(19) United States
(12) Patent Application Publication
(10) Pub. No.: US 2021/0403917 A1
(43) Pub. Date: Dec. 30, 2021

(54) COMPOSITIONS AND METHODS FOR INHIBITING EXPRESSION OF THE PCSK9 GENE

(71) Applicant: Alnylam Pharmaceuticals, Inc., Cambridge, MA (US)

(72) Inventors: Pamela Tan, Kulmbach (DE); Birgit Bramlage, Kulmbach (DE); Maria Frank-Kamenetsky, Brookline, MA (US); Kevin Fitzgerald, Brookline, MA (US); Akin Akinc, Needham, MA (US); Victor E. Kotelianski, Boston, MA (US)

(73) Assignee: Alnylam Pharmaceuticals, Inc., Cambridge, MA (US)

(21) Appl. No.: 17/186,078

(22) Filed: Feb. 26, 2021

Related U.S. Application Data
(63) Continuation of application No. 16/675,035, filed on Nov. 5, 2019, now abandoned.
Application No. 16/675,035 is a continuation of application No. 15/807,275, filed on Nov. 8, 2017, now Pat. No. 10,501,742.
Application No. 15/807,275 is a continuation of application No. 15/005,933, filed on Jan. 25, 2016, now Pat. No. 9,822,365.
Application No. 15/005,933 is a continuation of application No. 14/330,923, filed on Jul. 14, 2014, now Pat. No. 9,260,718.
Application No. 14/330,923 is a continuation of application No. 13/472,438, filed on May 15, 2012, now Pat. No. 8,809,292.
Application No. 13/472,438 is a continuation of application No. 12/554,231, filed on Sep. 4, 2009, now Pat. No. 8,222,222.
Application No. 12/554,231 is a division of application No. 11/746,864, filed on May 10, 2007, now Pat. No. 7,605,251.
(60) Provisional application No. 60/799,458, filed on May 11, 2006.
(60) Provisional application No. 60/817,203, filed on Jun. 27, 2006.
(60) Provisional application No. 60/840,089, filed on Aug. 25, 2006.
(60) Provisional application No. 60/829,914, filed on Oct. 18, 2006.
(60) Provisional application No. 60/901,134, filed on Feb. 13, 2007.

(51) Int. Cl. C12N 15/113; A61K 31/713

(52) U.S. Cl. CPC C12N 15/1137; A61K 31/713; C12N 2310/111; C12N 2310/14; C12N 2310/3515; C12N 2310/321; C12N 2310/322; C12N 2310/332; C12N 2310/315

(57) ABSTRACT

The invention relates to a double-stranded ribonucleic acid (dsRNA) for inhibiting the expression of the PCSK9 gene (PCSK9 gene), comprising an antisense strand having a nucleotide sequence which is less that 30 nucleotides in length, generally 19-25 nucleotides in length, and which is substantially complementary to at least a part of the PCSK9 gene. The invention also relates to a pharmaceutical composition comprising the dsRNA together with a pharmaceutically acceptable carrier and method for treating diseases caused by PCSK9 gene expression.

### CROSS-REFERENCE TO RELATED APPLICATIONS

[0001] This application is a continuation of U.S. application Ser. No. 16/675,035, filed on Nov. 5, 2019, which is a continuation of U.S. application Ser. No. 15/807,275, filed Nov. 8, 2017, now U.S. Pat. No. 10,501,742, issued on Dec. 10, 2019, which is a continuation of U.S. application Ser. No. 15/005,933, filed Jan. 25, 2016, now U.S. Pat. No. 9,822,365, issued Nov. 21, 2017, which is a continuation of U.S. application Ser. No. 14/330,923 filed Jul. 14, 2014, now U.S. Pat. No. 9,260,718, issued Feb. 16, 2016, which is a continuation of U.S. application Ser. No. 13/472,438, filed May 15, 2012, now U.S. Pat. No. 8,809,292 issued Aug. 19, 2014, which is a continuation of U.S. application Ser. No. 12/554,231, filed Sep. 4, 2009, now U.S. Pat. No. 8,222,222, issued on Jul. 17, 2012, which is a divisional of U.S. application Ser. No. 11/746,864, filed May 10, 2007, now U.S. Pat. No. 7,605,251, issued on Oct. 20, 2009, which claims the benefit of and priority to U.S. Provisional Application No. 60/799,458, filed May 11, 2006; U.S. Provisional Application No. 60/817,203, filed Jun. 27, 2006; U.S. Provisional Application No. 60/840,089, filed Aug. 25, 2006; U.S. Provisional Application No. 60/829,914, filed Oct. 18, 2006; and U.S. Provisional Application No. 60/901,134, filed Feb. 13, 2007. The contents of all of these applications are hereby incorporated by reference in their entirety.

### SEQUENCE LSITING

[0002] The instant application contains a Sequence Listing which has been submitted via EFS-Web and is hereby incorporated by reference in its entirety. Said ASCII copy, created on Aug. 31, 2021, is named 121301_13013_SeqList.txt and is 3,180,998 bytes in size.

### FIELD OF THE INVENTION

[0003] This invention relates to double-stranded ribonucleic acid (dsRNA), and its use in mediating RNA interference to inhibit the expression of the PCSK9 gene and the use of the dsRNA to treat pathological processes which can be mediated by down regulating PCSK9, such as hyperlipidemia.

### BACKGROUND OF THE INVENTION

[0004] Proprotein convertase subtilisin kexin 9 (PCSK9) is a member of the subtilisin serine protease family. The other eight mammalian subtilisin proteases, PCSK1-PCSK8 (also called PC1/3, PC2, furin, PC4, PC5/6, PACE4, PC7, and S1P/SKI-1) are proprotein convertases that process a wide variety of proteins in the secretory pathway and play roles in diverse biological processes (Bergeron, F. (2000) J. Mol. Endocrinol. 24, 1-22, Gensberg, K., (1998) Semin. Cell Dev. Biol. 9, 11-17, Seidah, N. G. (1999) Brain Res. 848, 45-62, Taylor, N. A., (2003) FASEB J. 17, 1215-1227, and Zhou, A., (1999) J. Biol. Chem. 274, 20745-20748). PCSK9 has been proposed to play a role in cholesterol metabolism. PCSK9 mRNA expression is down-regulated by dietary cholesterol feeding in mice (Maxwell, K. N., (2003) J. Lipid Res. 44, 2109-2119), up-regulated by statins in HepG2 cells (Dubuc, G., (2004) Arterioscler. Thromb. Vasc. Biol. 24, 1454-1459), and up-regulated in sterol regulatory element binding protein (SREBP) transgenic mice (Horton, J. D., (2003) Proc. Natl. Acad. Sci. USA 100, 12027-12032), similar to the cholesterol biosynthetic enzymes and the low-density lipoprotein receptor (LDLR). Furthermore, PCSK9 missense mutations have been found to be associated with a form of autosomal dominant hypercholesterolemia (Hchola3) (Abifadel, M., et al. (2003) Nat. Genet. 34, 154-156, Timms, K. M., (2004) Hum. Genet. 114, 349-353, Leren, T. P. (2004) Clin. Genet. 65, 419-422). PCSK9 may also play a role in determining LDL cholesterol levels in the general population, because single-nucleotide polymorphisms (SNPs) have been associated with cholesterol levels in a Japanese population (Shioji, K., (2004) J. Hum. Genet. 49, 109-114).

[0005] Autosomal dominant hypercholesterolemias (ADHs) are monogenic diseases in which patients exhibit elevated total and LDL cholesterol levels, tendon xanthomas, and premature atherosclerosis (Rader, D. J., (2003) J. Clin. Invest. 111, 1795-1803). The pathogenesis of ADHs and a recessive form, autosomal recessive hypercholesterolemia (ARH) (Cohen, J. C., (2003) Curr. Opin. Lipidol. 14, 121-127), is due to defects in LDL uptake by the liver. ADH may be caused by LDLR mutations, which prevent LDL uptake, or by mutations in the protein on LDL, apolipoprotein B, which binds to the LDLR. ARH is caused by mutations in the ARH protein that are necessary for endocytosis of the LDLR-LDL complex via its interaction with clathrin. Therefore, if PCSK9 mutations are causative in Hchola3 families, it seems likely that PCSK9 plays a role in receptor-mediated LDL uptake.

[0006] Overexpression studies point to a role for PCSK9 in controlling LDLR levels and, hence, LDL uptake by the liver (Maxwell, K. N. (2004) Proc. Natl. Acad. Sci. USA 101, 7100-7105, Benjannet, S., et al. (2004) J. Biol. Chem. 279, 48865-48875, Park, S. W., (2004) J. Biol. Chem. 279, 50630-50638). Adenoviral-mediated overexpression of mouse or human PCSK9 for 3 or 4 days in mice results in elevated total and LDL cholesterol levels; this effect is not seen in LDLR knockout animals (Maxwell, K. N. (2004) Proc. Natl. Acad. Sci. USA 101, 7100-7105, Benjannet, S., et al. (2004) J. Biol. Chem. 279, 48865-48875, Park, S. W., (2004) J. Biol. Chem. 279, 50630-50638). In addition, PCSK9 overexpression results in a severe reduction in hepatic LDLR protein, without affecting LDLR mRNA levels, SREBP protein levels, or SREBP protein nuclear to cytoplasmic ratio. These results indicate that PCSK9, either directly or indirectly, reduces LDLR protein levels by a posttranscriptional mechanism

[0007] Loss of function mutations in PCSK9 have been designed in mouse models (Rashid et. al., (2005) PNAS, 102, 5374-5379., and identified in human individuals Cohen et al., (2005), Nature Genetics., 37, 161-165. In both cases loss of PCSK9 function lead to lowering of total and LDLc cholesterol. In a retrospective outcome study over 15 years, loss of one copy of PCSK9 was shown to shift LDLc lower and to lead to an increased risk-benefit protection from developing cardiovascular heart disease (Cohen et.al., 2006 N. Engl. J. Med., 354., 1264-1272.). Clearly the evidence to date indicates that lowering of PCSK9 levels will lower LDLc.

[0008] Recently, double-stranded RNA molecules (dsRNA) have been shown to block gene expression in a highly conserved regulatory mechanism known as RNA interference (RNAi). WO 99/32619 (Fire et al.) discloses the use of a dsRNA of at least 25 nucleotides in length to inhibit the expression of genes in C. elegans. dsRNA has also been shown to degrade target RNA in other organisms, including plants (see, e.g., WO 99/53050, Waterhouse et al.; and WO 99/61631, Heifetz et al.), Drosophila (see, e.g., Yang, D., et al., Curr. Biol. (2000) 10:1191-1200), and mammals (see WO 00/44895, Limmer; and DE 101 00 586.5, Kreutzer et al.). This natural mechanism has now become the focus for the development of a new class of pharmaceutical agents for treating disorders that are caused by the aberrant or unwanted regulation of a gene.

[0009] Despite significant advances in the field of RNAi and advances in the treatment of pathological processes which can be mediated by down regulating PCSK9 gene expression, there remains a need for agents that can inhibit PCSK9 gene expression and that can treat diseases associated with PCSK9 gene expression such as hyperlipidemia.

### SUMMARY OF THE INVENTION

[0010] The invention provides a solution to the problem of treating diseases that can be modulated by down regulating the proprotein convertase subtilisin kexin 9 (PCSK9) by using double-stranded ribonucleic acid (dsRNA) to silence PCSK9 expression.

[0011] The invention provides double-stranded ribonucleic acid (dsRNA), as well as compositions and methods for inhibiting the expression of the PCSK9 gene in a cell or mammal using such dsRNA. The invention also provides compositions and methods for treating pathological conditions that can modulated by down regulating the expression of the PCSK9 gene, such as hyperlipidemia. The dsRNA of the invention comprises an RNA strand (the antisense strand) having a region which is less than 30 nucleotides in length, generally 19-24 nucleotides in length, and is substantially complementary to at least part of an mRNA transcript of the PCSK9 gene.

[0012] In one embodiment, the invention provides double-stranded ribonucleic acid (dsRNA) molecules for inhibiting the expression of the PCSK9 gene. The dsRNA comprises at least two sequences that are complementary to each other. The dsRNA comprises a sense strand comprising a first sequence and an antisense strand comprising a second sequence. The antisense strand comprises a nucleotide sequence which is substantially complementary to at least part of an mRNA encoding PCSK9, and the region of complementarity is less than 30 nucleotides in length, generally 19-24 nucleotides in length. The dsRNA, upon contacting with a cell expressing the PCSK9, inhibits the expression of the PCSK9 gene by at least 40%.

[0013] For example, the dsRNA molecules of the invention can be comprised of a first sequence of the dsRNA that is selected from the group consisting of the sense sequences of Table 1 and Table 2 the second sequence is selected from the group consisting of the antisense sequences of Tables 1 and Table 2. The dsRNA molecules of the invention can be comprised of naturally occurring nucleotides or can be comprised of at least one modified nucleotide, such as a 2′-O-methyl modified nucleotide, a nucleotide comprising a 5′-phosphorothioate group, and a terminal nucleotide linked to a cholesteryl derivative. Alternatively, the modified nucleotide may be chosen from the group of: a 2′-deoxy-2′-fluoro modified nucleotide, a 2′-deoxy-modified nucleotide, a locked nucleotide, an abasic nucleotide, 2′-amino-modified nucleotide, 2′-alkyl-modified nucleotide, morpholino nucleotide, a phosphoramidate, and a non-natural base comprising nucleotide. Generally, such modified sequence will be based on a first sequence of the dsRNA selected from the group consisting of the sense sequences of Tables 1 and Table 2 and a second sequence selected from the group consisting of the antisense sequences of Tables 1, and Table 2.

[0014] In another embodiment, the invention provides a cell comprising one of the dsRNAs of the invention. The cell is generally a mammalian cell, such as a human cell.

[0015] In another embodiment, the invention provides a pharmaceutical composition for inhibiting the expression of the PCSK9 gene in an organism, generally a human subject, comprising one or more of the dsRNA of the invention and a pharmaceutically acceptable carrier or delivery vehicle.

[0016] In another embodiment, the invention provides a method for inhibiting the expression of the PCSK9 gene in a cell, comprising the following steps:

[0017] (a) introducing into the cell a double-stranded ribonucleic acid (dsRNA), wherein the dsRNA comprises at least two sequences that are complementary to each other. The dsRNA comprises a sense strand comprising a first sequence and an antisense strand comprising a second sequence. The antisense strand comprises a region of complementarity which is substantially complementary to at least a part of a mRNA encoding PCSK9, and wherein the region of complementarity is less than 30 nucleotides in length, generally 19-24 nucleotides in length, and wherein the dsRNA, upon contact with a cell expressing the PCSK9, inhibits expression of the PCSK9 gene by at least 40%; and

[0018] (b) maintaining the cell produced in step (a) for a time sufficient to obtain degradation of the mRNA transcript of the PCSK9 gene, thereby inhibiting expression of the PCSK9 gene in the cell.

[0019] In another embodiment, the invention provides methods for treating, preventing or managing pathological processes which can be mediated by down regulating PCSK9 gene expression, e.g. hyperlipidemia, comprising administering to a patient in need of such treatment, prevention or management a therapeutically or prophylactically effective amount of one or more of the dsRNAs of the invention.

[0020] In another embodiment, the invention provides vectors for inhibiting the expression of the PCSK9 gene in a cell, comprising a regulatory sequence operably linked to a nucleotide sequence that encodes at least one strand of one of the dsRNA of the invention.

[0021] In another embodiment, the invention provides a cell comprising a vector for inhibiting the expression of the PCSK9 gene in a cell. The vector comprises a regulatory sequence operably linked to a nucleotide sequence that encodes at least one strand of one of the dsRNA of the invention.

### BRIEF DESCRIPTION OF THE FIGURES

[0022] FIG. 1 shows the structure of the ND-98 lipid.

[0023] FIG. 2 shows the results of the in vivo screen of 16 mouse specific (AL-DP-9327 through AL-DP-9342) PCSK9 siRNAs directed against different ORF regions of PCSK9 mRNA (having the first nucleotide corresponding to the ORF position indicated on the graph) in C57/BL6 mice (5 animals/group). The ratio of PCSK9 mRNA to GAPDH mRNA in liver lysates was averaged over each treatment group and compared to a control group treated with PBS or a control group treated with an unrelated siRNA (blood coagulation factor VII).

[0024] FIG. 3 shows the results of the in vivo screen of 16 human/mouse/rat crossreactive (AL-DP-9311 through AL-DP-9326) PCSK9 siRNAs directed against different ORF regions of PCSK9 mRNA (having the first nucleotide corresponding to the ORF position indicated on the graph) in C57/BL6 mice (5 animals/group). The ratio of PCSK9 mRNA to GAPDH mRNA in liver lysates was averaged over each treatment group and compared to a control group treated with PBS or a control group treated with an unrelated siRNA (blood coagulation factor VII). Silencing of PCSK9 mRNA resulted in lowering total serum cholesterol levels. The most efficacious in terms of knocking down PSCK9 message siRNAs showed the most pronounced cholesterol lowering effect (around 20-30%).

[0025] FIG. 4 shows the results of the in vivo screen of 16 mouse specific (AL-DP-9327 through AL-DP-9342) PCSK9 siRNAs in C57/BL6 mice (5 animals/group). Total serum cholesterol levels were averaged over each treatment group and compared to a control group treated with PBS or a control group treated with an unrelated siRNA (blood coagulation factor VII).

[0026] FIG. 5 shows the results of the in vivo screen of 16 human/mouse/rat crossreactive (AL-DP-9311 through AL-DP-9326) PCSK9 siRNAs in C57/BL6 mice (5 animals/group). Total serum cholesterol levels were averaged over each treatment group and compared to a control group treated with PBS or a control group treated with an unrelated siRNA (blood coagulation factor VII).

[0027] FIG. 6A and FIG. 6B each shows a comparison of the in vitro and in vivo results for silencing PCSK9.

[0028] FIG. 7A and FIG. 7B show in vitro results for silencing PCSK9 using monkey primary hepatocytes.

[0029] FIG. 8 shows in vivo activity of LNP-01 formulated siRNAs to pcsk-9.

[0030] FIG. 9 shows in vivo activity of LNP-01 Formulated chemically modified 9314 and 10792 parent molecules at different times. Clearly modified versions of 10792 display in vivo silencing activity.

### DETAILED DESCRIPTION OF THE INVENTION

[0031] The invention provides a solution to the problem of treating diseases that can be modulated by the down regulation of the PCSK9 gene, by using double-stranded ribonucleic acid (dsRNA) to silence the PCSK9 gene thus providing treatment for diseases such as hyperlipidemia.

[0032] The invention provides double-stranded ribonucleic acid (dsRNA), as well as compositions and methods for inhibiting the expression of the PCSK9 gene in a cell or mammal using the dsRNA. The invention also provides compositions and methods for treating pathological conditions and diseases that can be modulated by down regulating the expression of the PCSK9 gene. dsRNA directs the sequence-specific degradation of mRNA through a process known as RNA interference (RNAi).

[0033] The dsRNA of the invention comprises an RNA strand (the antisense strand) having a region which is less than 30 nucleotides in length, generally 19-24 nucleotides in length, and is substantially complementary to at least part of an mRNA transcript of the PCSK9 gene. The use of these dsRNAs enables the targeted degradation of an mRNA that is involved in sodium transport. Using cell-based and animal assays, the present inventors have demonstrated that very low dosages of these dsRNA can specifically and efficiently mediate RNAi, resulting in significant inhibition of expression of the PCSK9 gene. Thus, the methods and compositions of the invention comprising these dsRNAs are useful for treating pathological processes which can be mediated by down regulating PCSK9, such as in the treatment of hyperlipidemia.

[0034] The following detailed description discloses how to make and use the dsRNA and compositions containing dsRNA to inhibit the expression of the target PCSK9 gene, as well as compositions and methods for treating diseases that can be modulated by down regulating the expression of PCSK9, such as hyperlipidemia. The pharmaceutical compositions of the invention comprise a dsRNA having an antisense strand comprising a region of complementarity which is less than 30 nucleotides in length, generally 19-24 nucleotides in length, and is substantially complementary to at least part of an RNA transcript of the PCSK9 gene, together with a pharmaceutically acceptable carrier.

[0035] Accordingly, certain aspects of the invention provide pharmaceutical compositions comprising the dsRNA of the invention together with a pharmaceutically acceptable carrier, methods of using the compositions to inhibit expression of the PCSK9 gene, and methods of using the pharmaceutical compositions to treat diseases that can be modulated by down regulating the expression of PCSK9.

### I. Definitions

[0036] For convenience, the meaning of certain terms and phrases used in the specification, examples, and appended claims, are provided below. If there is an apparent discrepancy between the usage of a term in other parts of this specification and its definition provided in this section, the definition in this section shall prevail.

[0037] “G,” “C,” “A” and “U” each generally stand for a nucleotide that contains guanine, cytosine, adenine, and uracil as a base, respectively. However, it will be understood that the term “ribonucleotide” or “nucleotide” can also refer to a modified nucleotide, as further detailed below, or a surrogate replacement moiety. The skilled person is well aware that guanine, cytosine, adenine, and uracil may be replaced by other moieties without substantially altering the base pairing properties of an oligonucleotide comprising a nucleotide bearing such replacement moiety. For example, without limitation, a nucleotide comprising inosine as its base may base pair with nucleotides containing adenine, cytosine, or uracil. Hence, nucleotides containing uracil, guanine, or adenine may be replaced in the nucleotide sequences of the invention by a nucleotide containing, for example, inosine. Sequences comprising such replacement moieties are embodiments of the invention.

[0038] As used herein, “PCSK9” refers to the proprotein convertase subtilisin kexin 9 gene or protein (also known as FH3, HCHOLA3, NARC-1, NARC1). mRNA sequences to PCSK9 are provided as human: NM_174936; mouse: NM_153565, and rat: NM_199253.

[0039] As used herein, “target sequence” refers to a contiguous portion of the nucleotide sequence of an mRNA molecule formed during the transcription of the PCSK9 gene, including mRNA that is a product of RNA processing of a primary transcription product.

[0040] As used herein, the term “strand comprising a sequence” refers to an oligonucleotide comprising a chain of nucleotides that is described by the sequence referred to using the standard nucleotide nomenclature.

[0041] As used herein, and unless otherwise indicated, the term “complementary,” when used to describe a first nucleotide sequence in relation to a second nucleotide sequence, refers to the ability of an oligonucleotide or polynucleotide comprising the first nucleotide sequence to hybridize and form a duplex structure under certain conditions with an oligonucleotide or polynucleotide comprising the second nucleotide sequence, as will be understood by the skilled person. Such conditions can, for example, be stringent conditions, where stringent conditions may include: 400 mM NaCl, 40 mM PIPES pH 6.4, 1 mM EDTA, 50° C. or 70° C. for 12-16 hours followed by washing. Other conditions, such as physiologically relevant conditions as may be encountered inside an organism, can apply. The skilled person will be able to determine the set of conditions most appropriate for a test of complementarity of two sequences in accordance with the ultimate application of the hybridized nucleotides.

[0042] This includes base-pairing of the oligonucleotide or polynucleotide comprising the first nucleotide sequence to the oligonucleotide or polynucleotide comprising the second nucleotide sequence over the entire length of the first and second nucleotide sequence. Such sequences can be referred to as “fully complementary” with respect to each other herein. However, where a first sequence is referred to as “substantially complementary” with respect to a second sequence herein, the two sequences can be fully complementary, or they may form one or more, but generally not more than 4, 3 or 2 mismatched base pairs upon hybridization, while retaining the ability to hybridize under the conditions most relevant to their ultimate application. However, where two oligonucleotides are designed to form, upon hybridization, one or more single stranded overhangs, such overhangs shall not be regarded as mismatches with regard to the determination of complementarity. For example, a dsRNA comprising one oligonucleotide 21 nucleotides in length and another oligonucleotide 23 nucleotides in length, wherein the longer oligonucleotide comprises a sequence of 21 nucleotides that is fully complementary to the shorter oligonucleotide, may yet be referred to as “fully complementary” for the purposes of the invention.

[0043] “Complementary” sequences, as used herein, may also include, or be formed entirely from, non-Watson-Crick base pairs and/or base pairs formed from non-natural and modified nucleotides, in as far as the above requirements with respect to their ability to hybridize are fulfilled.

[0044] The terms “complementary”, “fully complementary” and “substantially complementary” herein may be used with respect to the base matching between the sense strand and the antisense strand of a dsRNA, or between the antisense strand of a dsRNA and a target sequence, as will be understood from the context of their use.

[0045] As used herein, a polynucleotide which is “substantially complementary to at least part of” a messenger RNA (mRNA) refers to a polynucleotide which is substantially complementary to a contiguous portion of the mRNA of interest (e.g., encoding PCSK9). For example, a polynucleotide is complementary to at least a part of a PCSK9 mRNA if the sequence is substantially complementary to a non-interrupted portion of a mRNA encoding PCSK9.

[0046] The term “double-stranded RNA” or “dsRNA”, as used herein, refers to a complex of ribonucleic acid molecules, having a duplex structure comprising two anti-parallel and substantially complementary, as defined above, nucleic acid strands. The two strands forming the duplex structure may be different portions of one larger RNA molecule, or they may be separate RNA molecules. Where separate RNA molecules, such dsRNA are often referred to in the literature as siRNA (“short interfering RNA”). Where the two strands are part of one larger molecule, and therefore are connected by an uninterrupted chain of nucleotides between the 3′-end of one strand and the 5′ end of the respective other strand forming the duplex structure, the connecting RNA chain is referred to as a “hairpin loop”, “short hairpin RNA” or “shRNA”. Where the two strands are connected covalently by means other than an uninterrupted chain of nucleotides between the 3′-end of one strand and the 5′end of the respective other strand forming the duplex structure, the connecting structure is referred to as a “linker”. The RNA strands may have the same or a different number of nucleotides. The maximum number of base pairs is the number of nucleotides in the shortest strand of the dsRNA minus any overhangs that are present in the duplex. In addition to the duplex structure, a dsRNA may comprise one or more nucleotide overhangs. In addition, as used in this specification, “dsRNA” may include chemical modifications to ribonucleotides, including substantial modifications at multiple nucleotides and including all types of modifications disclosed herein or known in the art. Any such modifications, as used in an siRNA type molecule, are encompassed by “dsRNA” for the purposes of this specification and claims.

[0047] As used herein, a “nucleotide overhang” refers to the unpaired nucleotide or nucleotides that protrude from the duplex structure of a dsRNA when a 3′-end of one strand of the dsRNA extends beyond the 5′-end of the other strand, or vice versa. “Blunt” or “blunt end” means that there are no unpaired nucleotides at that end of the dsRNA, i.e., no nucleotide overhang. A “blunt ended” dsRNA is a dsRNA that is double-stranded over its entire length, i.e., no nucleotide overhang at either end of the molecule. For clarity, chemical caps or non-nucleotide chemical moieties conjugated to the 3′ end or 5′ end of an siRNA are not considered in determining whether an siRNA has an overhang or is blunt ended.

[0048] The term “antisense strand” refers to the strand of a dsRNA which includes a region that is substantially complementary to a target sequence. As used herein, the term “region of complementarity” refers to the region on the antisense strand that is substantially complementary to a sequence, for example a target sequence, as defined herein. Where the region of complementarity is not fully complementary to the target sequence, the mismatches are most tolerated in the terminal regions and, if present, are generally in a terminal region or regions, e.g., within 6, 5, 4, 3, or 2 nucleotides of the 5′ and/or 3′ terminus.

[0049] The term “sense strand,” as used herein, refers to the strand of a dsRNA that includes a region that is substantially complementary to a region of the antisense strand.

[0050] “Introducing into a cell”, when referring to a dsRNA, means facilitating uptake or absorption into the cell, as is understood by those skilled in the art. Absorption or uptake of dsRNA can occur through unaided diffusive or active cellular processes, or by auxiliary agents or devices. The meaning of this term is not limited to cells in vitro; a dsRNA may also be “introduced into a cell”, wherein the cell is part of a living organism. In such instance, introduction into the cell will include the delivery to the organism. For example, for in vivo delivery, dsRNA can be injected into a tissue site or administered systemically. In vitro introduction into a cell includes methods known in the art such as electroporation and lipofection.

[0051] The terms “silence” and “inhibit the expression of”, in as far as they refer to the PCSK9 gene, herein refer to the at least partial suppression of the expression of the PCSK9 gene, as manifested by a reduction of the amount of mRNA transcribed from the PCSK9 gene which may be isolated from a first cell or group of cells in which the PCSK9 gene is transcribed and which has or have been treated such that the expression of the PCSK9 gene is inhibited, as compared to a second cell or group of cells substantially identical to the first cell or group of cells but which has or have not been so treated (control cells). The degree of inhibition is usually expressed in terms of

$$\frac{( mRNA in control cells ) - ( mRNA in treated cells )}{( mRNA in control cells )} \cdot 100 \%$$

[0052] Alternatively, the degree of inhibition may be given in terms of a reduction of a parameter that is functionally linked to PCSK9 gene transcription, e.g. the amount of protein encoded by the PCSK9 gene which is secreted by a cell, or the number of cells displaying a certain phenotype, e.g apoptosis. In principle, PCSK9 gene silencing may be determined in any cell expressing the target, either constitutively or by genomic engineering, and by any appropriate assay. However, when a reference is needed in order to determine whether a given dsRNA inhibits the expression of the PCSK9 gene by a certain degree and therefore is encompassed by the instant invention, the assay provided in the Examples below shall serve as such reference.

[0053] For example, in certain instances, expression of the PCSK9 gene is suppressed by at least about 20%, 25%, 35%, or 50% by administration of the double-stranded oligonucleotide of the invention. In some embodiment, the PCSK9 gene is suppressed by at least about 60%, 70%, or 80% by administration of the double-stranded oligonucleotide of the invention. In some embodiments, the PCSK9 gene is suppressed by at least about 85%, 90%, or 95% by administration of the double-stranded oligonucleotide of the invention. Tables 1, 2, provides a wide range of values for inhibition of expression obtained in an in vitro assay using various PCSK9 dsRNA molecules at various concentrations.

[0054] As used herein in the context of PCSK9 expression, the terms “treat”, “treatment”, and the like, refer to relief from or alleviation of pathological processes which can be mediated by down regulating PCSK9 gene. In the context of the present invention insofar as it relates to any of the other conditions recited herein below (other than pathological processes which can be mediated by down regulating the PCSK9 gene), the terms “treat”, “treatment”, and the like mean to relieve or alleviate at least one symptom associated with such condition, or to slow or reverse the progression of such condition. For example, in the context of hyperlipidemia, treatment will involve a decrease in serum lipid levels.

[0055] As used herein, the phrases “therapeutically effective amount” and “prophylactically effective amount” refer to an amount that provides a therapeutic benefit in the treatment, prevention, or management of pathological processes which can be mediated by down regulating the PCSK9 gene on or an overt symptom of pathological processes which can be mediated by down regulating the PCSK9 gene. The specific amount that is therapeutically effective can be readily determined by ordinary medical practitioner, and may vary depending on factors known in the art, such as, e.g. the type of pathological processes which can be mediated by down regulating the PCSK9 gene, the patient's history and age, the stage of pathological processes which can be mediated by down regulating PCSK9 gene expression, and the administration of other anti-pathological processes which can be mediated by down regulating PCSK9 gene expression.

[0056] As used herein, a “pharmaceutical composition” comprises a pharmacologically effective amount of a dsRNA and a pharmaceutically acceptable carrier. As used herein, “pharmacologically effective amount,” “therapeutically effective amount” or simply “effective amount” refers to that amount of an RNA effective to produce the intended pharmacological, therapeutic or preventive result. For example, if a given clinical treatment is considered effective when there is at least a 25% reduction in a measurable parameter associated with a disease or disorder, a therapeutically effective amount of a drug for the treatment of that disease or disorder is the amount necessary to effect at least a 25% reduction in that parameter.

[0057] The term “pharmaceutically acceptable carrier” refers to a carrier for administration of a therapeutic agent. Such carriers include, but are not limited to, saline, buffered saline, dextrose, water, glycerol, ethanol, and combinations thereof and are described in more detail below. The term specifically excludes cell culture medium.

[0058] As used herein, a “transformed cell” is a cell into which a vector has been introduced from which a dsRNA molecule may be expressed.

### II. Double-Stranded Ribonucleic Acid (dsRNA)

[0059] In one embodiment, the invention provides double-stranded ribonucleic acid (dsRNA) molecules for inhibiting the expression of the PCSK9 gene in a cell or mammal, wherein the dsRNA comprises an antisense strand comprising a region of complementarity which is complementary to at least a part of an mRNA formed in the expression of the PCSK9 gene, and wherein the region of complementarity is less than 30 nucleotides in length, generally 19-24 nucleotides in length, and wherein the dsRNA, upon contact with a cell expressing the PCSK9 gene, inhibits the expression of the PCSK9 gene by at least 40%. The dsRNA comprises two RNA strands that are sufficiently complementary to hybridize to form a duplex structure. One strand of the dsRNA (the antisense strand) comprises a region of complementarity that is substantially complementary, and generally fully complementary, to a target sequence, derived from the sequence of an mRNA formed during the expression of the PCSK9 gene, the other strand (the sense strand) comprises a region which is complementary to the antisense strand, such that the two strands hybridize and form a duplex structure when combined under suitable conditions. Generally, the duplex structure is between 15 and 30, more generally between 18 and 25, yet more generally between 19 and 24, and most generally between 19 and 21 base pairs in length. Similarly, the region of complementarity to the target sequence is between 15 and 30, more generally between 18 and 25, yet more generally between 19 and 24, and most generally between 19 and 21 nucleotides in length. The dsRNA of the invention may further comprise one or more single-stranded nucleotide overhang(s). The dsRNA can be synthesized by standard methods known in the art as further discussed below, e.g., by use of an automated DNA synthesizer, such as are commercially available from, for example, Biosearch, Applied Biosystems, Inc. In a preferred embodiment, the PCSK9 gene is the human PCSK9 gene. In specific embodiments, the antisense strand of the dsRNA comprises a strand selected from the sense sequences of Tables 1 and 2, and a second sequence selected from the group consisting of the antisense sequences of Tables 1 and 2. Alternative antisense agents that target elsewhere in the target sequence provided in Tables 1 and 2, can readily be determined using the target sequence and the flanking PCSK9 sequence.

[0060] In further embodiments, the dsRNA comprises at least one nucleotide sequence selected from the groups of sequences provided in Tables 1 and 2. In other embodiments, the dsRNA comprises at least two sequences selected from this group, wherein one of the at least two sequences is complementary to another of the at least two sequences, and one of the at least two sequences is substantially complementary to a sequence of an mRNA generated in the expression of the PCSK9 gene. Generally, the dsRNA comprises two oligonucleotides, wherein one oligonucleotide is described as the sense strand in Tables 1 and 2 and the second oligonucleotide is described as the antisense strand in Tables 1 and 2

[0061] The skilled person is well aware that dsRNAs comprising a duplex structure of between 20 and 23, but specifically 21, base pairs have been hailed as particularly effective in inducing RNA interference (Elbashir et al., EMBO 2001, 20:6877-6888). However, others have found that shorter or longer dsRNAs can be effective as well. In the embodiments described above, by virtue of the nature of the oligonucleotide sequences provided in Tables 1 and 2, the dsRNAs of the invention can comprise at least one strand of a length of minimally 21 nt. It can be reasonably expected that shorter dsRNAs comprising one of the sequences of Tables 1 and 2 minus only a few nucleotides on one or both ends may be similarly effective as compared to the dsRNAs described above. Hence, dsRNAs comprising a partial sequence of at least 15, 16, 17, 18, 19, 20, or more contiguous nucleotides from one of the sequences of Tables 1 and 2, and differing in their ability to inhibit the expression of the PCSK9 gene in a FACS assay as described herein below by not more than 5, 10, 15, 20, 25, or 30% inhibition from a dsRNA comprising the full sequence, are contemplated by the invention. Further dsRNAs that cleave within the target sequence provided in Tables 1 and 2 can readily be made using the PCSK9 sequence and the target sequence provided.

[0062] In addition, the RNAi agents provided in Tables 1 and 2 identify a site in the PCSK9 mRNA that is susceptible to RNAi based cleavage. As such the present invention further includes RNAi agents that target within the sequence targeted by one of the agents of the present invention. As used herein a second RNAi agent is the to target within the sequence of a first RNAi agent if the second RNAi agent cleaves the message anywhere within the mRNA that is complementary to the antisense strand of the first RNAi agent. Such a second agent will generally consist of at least 15 contiguous nucleotides from one of the sequences provided in Tables 1 and 2 coupled to additional nucleotide sequences taken from the region contiguous to the selected sequence in the PCSK9 gene. For example, the last 15 nucleotides of SEQ ID NO:1 (minus the added AA sequences) combined with the next 6 nucleotides from the target PCSK9 gene produces a single strand agent of 21 nucleotides that is based on one of the sequences provided in Tables 1 and 2.

[0063] The dsRNA of the invention can contain one or more mismatches to the target sequence. In a preferred embodiment, the dsRNA of the invention contains no more than 3 mismatches. If the antisense strand of the dsRNA contains mismatches to a target sequence, it is preferable that the area of mismatch not be located in the center of the region of complementarity. If the antisense strand of the dsRNA contains mismatches to the target sequence, it is preferable that the mismatch be restricted to 5 nucleotides from either end, for example 5, 4, 3, 2, or 1 nucleotide from either the 5′ or 3′ end of the region of complementarity. For example, for a 23 nucleotide dsRNA strand which is complementary to a region of the PCSK9 gene, the dsRNA generally does not contain any mismatch within the central 13 nucleotides. The methods described within the invention can be used to determine whether a dsRNA containing a mismatch to a target sequence is effective in inhibiting the expression of the PCSK9 gene. Consideration of the efficacy of dsRNAs with mismatches in inhibiting expression of the PCSK9 gene is important, especially if the particular region of complementarity in the PCSK9 gene is known to have polymorphic sequence variation within the population.

[0064] In one embodiment, at least one end of the dsRNA has a single-stranded nucleotide overhang of 1 to 4, generally 1 or 2 nucleotides. dsRNAs having at least one nucleotide overhang have unexpectedly superior inhibitory properties than their blunt-ended counterparts. Moreover, the present inventors have discovered that the presence of only one nucleotide overhang strengthens the interference activity of the dsRNA, without affecting its overall stability. dsRNA having only one overhang has proven particularly stable and effective in vivo, as well as in a variety of cells, cell culture mediums, blood, and serum. Generally, the single-stranded overhang is located at the 3′-terminal end of the antisense strand or, alternatively, at the 3′-terminal end of the sense strand. The dsRNA may also have a blunt end, generally located at the 5′-end of the antisense strand. Such dsRNAs have improved stability and inhibitory activity, thus allowing administration at low dosages, i.e., less than 5 mg/kg body weight of the recipient per day. Generally, the antisense strand of the dsRNA has a nucleotide overhang at the 3′-end, and the 5′-end is blunt. In another embodiment, one or more of the nucleotides in the overhang is replaced with a nucleoside thiophosphate.

[0065] In yet another embodiment, the dsRNA is chemically modified to enhance stability. The nucleic acids of the invention may be synthesized and/or modified by methods well established in the art, such as those described in “Current protocols in nucleic acid chemistry”, Beaucage, S. L. et al. (Edrs.), John Wiley & Sons, Inc., New York, N.Y., USA, which is hereby incorporated herein by reference. Chemical modifications may include, but are not limited to 2′ modifications, modifications at other sites of the sugar or base of an oligonucleotide, introduction of non-natural bases into the olibonucleotide chain, covalent attachment to a ligand or chemical moiety, and replacement of internucleotide phosphate linkages with alternate linkages such as thiophosphates. More than one such modification may be employed.

[0066] Chemical linking of the two separate dsRNA strands may be achieved by any of a variety of well-known techniques, for example by introducing covalent, ionic or hydrogen bonds; hydrophobic interactions, van der Waals or stacking interactions; by means of metal-ion coordination, or through use of purine analogues. Generally, the chemical groups that can be used to modify the dsRNA include, without limitation, methylene blue; bifunctional groups, generally bis-(2-chloroethyl)amine; N-acetyl-N′-(p-glyoxylbenzoyl)cystamine; 4-thiouracil; and psoralen. In one embodiment, the linker is a hexa-ethylene glycol linker. In this case, the dsRNA are produced by solid phase synthesis and the hexa-ethylene glycol linker is incorporated according to standard methods (e.g., Williams, D. J., and K. B. Hall, Biochem. (1996) 35:14665-14670). In a particular embodiment, the 5′-end of the antisense strand and the 3′-end of the sense strand are chemically linked via a hexaethylene glycol linker. In another embodiment, at least one nucleotide of the dsRNA comprises a phosphorothioate or phosphorodithioate groups. The chemical bond at the ends of the dsRNA is generally formed by triple-helix bonds. Tables 1 and 2 provides examples of modified RNAi agents of the invention.

[0067] In yet another embodiment, the nucleotides at one or both of the two single strands may be modified to prevent or inhibit the degradation activities of cellular enzymes, such as, for example, without limitation, certain nucleases. Techniques for inhibiting the degradation activity of cellular enzymes against nucleic acids are known in the art including, but not limited to, 2′-amino modifications, 2′-amino sugar modifications, 2′-F sugar modifications, 2′-F modifications, 2′-alkyl sugar modifications, uncharged backbone modifications, morpholino modifications, 2′-O-methyl modifications, and phosphoramidate (see, e.g., Wagner, Nat. Med. (1995) 1:1116-8). Thus, at least one 2′-hydroxyl group of the nucleotides on a dsRNA is replaced by a chemical group, generally by a 2′-amino or a 2′-methyl group. Also, at least one nucleotide may be modified to form a locked nucleotide. Such locked nucleotide contains a methylene bridge that connects the 2′-oxygen of ribose with the 4′-carbon of ribose. Oligonucleotides containing the locked nucleotide are described in Koshkin, A. A., et al., Tetrahedron (1998), 54: 3607-3630) and Obika, S. et al., Tetrahedron Lett. (1998), 39: 5401-5404). Introduction of a locked nucleotide into an oligonucleotide improves the affinity for complementary sequences and increases the melting temperature by several degrees (Braasch, D. A. and D. R. Corey, Chem. Biol. (2001), 8:1-7).

[0068] Conjugating a ligand to a dsRNA can enhance its cellular absorption as well as targeting to a particular tissue or uptake by specific types of cells such as liver cells. In certain instances, a hydrophobic ligand is conjugated to the dsRNA to facilitate direct permeation of the cellular membrane and or uptake across the liver cells. Alternatively, the ligand conjugated to the dsRNA is a substrate for receptor-mediated endocytosis. These approaches have been used to facilitate cell permeation of antisense oligonucleotides as well as dsRNA agents. For example, cholesterol has been conjugated to various antisense oligonucleotides resulting in compounds that are substantially more active compared to their non-conjugated analogs. See M. Manoharan Antisense & Nucleic Acid Drug Development 2002, 12, 103. Other lipophilic compounds that have been conjugated to oligonucleotides include 1-pyrene butyric acid, 1,3-bis-O-(hexadecyl)glycerol, and menthol. One example of a ligand for receptor-mediated endocytosis is folic acid. Folic acid enters the cell by folate-receptor-mediated endocytosis. dsRNA compounds bearing folic acid would be efficiently transported into the cell via the folate-receptor-mediated endocytosis. Li and coworkers report that attachment of folic acid to the 3′-terminus of an oligonucleotide resulted in an 8-fold increase in cellular uptake of the oligonucleotide. Li, S.; Deshmukh, H. M.; Huang, L. Pharm. Res. 1998, 15, 1540. Other ligands that have been conjugated to oligonucleotides include polyethylene glycols, carbohydrate clusters, cross-linking agents, porphyrin conjugates, delivery peptides and lipids such as cholesterol.

[0069] In certain instances, conjugation of a cationic ligand to oligonucleotides results in improved resistance to nucleases. Representative examples of cationic ligands are propylammonium and dimethylpropylammonium. Interestingly, anti sense oligonucleotides were reported to retain their high binding affinity to mRNA when the cationic ligand was dispersed throughout the oligonucleotide. See M. Manoharan Antisense & Nucleic Acid Drug Development 2002, 12, 103 and references therein.

[0070] The ligand-conjugated dsRNA of the invention may be synthesized by the use of a dsRNA that bears a pendant reactive functionality, such as that derived from the attachment of a linking molecule onto the dsRNA. This reactive oligonucleotide may be reacted directly with commercially-available ligands, ligands that are synthesized bearing any of a variety of protecting groups, or ligands that have a linking moiety attached thereto. The methods of the invention facilitate the synthesis of ligand-conjugated dsRNA by the use of, in some preferred embodiments, nucleoside monomers that have been appropriately conjugated with ligands and that may further be attached to a solid-support material. Such ligand-nucleoside conjugates, optionally attached to a solid-support material, are prepared according to some preferred embodiments of the methods of the invention via reaction of a selected serum-binding ligand with a linking moiety located on the 5′ position of a nucleoside or oligonucleotide. In certain instances, an dsRNA bearing an aralkyl ligand attached to the 3′-terminus of the dsRNA is prepared by first covalently attaching a monomer building block to a controlled-pore-glass support via a long-chain aminoalkyl group. Then, nucleotides are bonded via standard solid-phase synthesis techniques to the monomer building-block bound to the solid support. The monomer building block may be a nucleoside or other organic compound that is compatible with solid-phase synthesis.

[0071] The dsRNA used in the conjugates of the invention may be conveniently and routinely made through the well-known technique of solid-phase synthesis. Equipment for such synthesis is sold by several vendors including, for example, Applied Biosystems (Foster City, Calif.). Any other means for such synthesis known in the art may additionally or alternatively be employed. It is also known to use similar techniques to prepare other oligonucleotides, such as the phosphorothioates and alkylated derivatives.

[0072] Teachings regarding the synthesis of particular modified oligonucleotides may be found in the following U.S. patents: U.S. Pat. Nos. 5,138,045 and 5,218,105, drawn to polyamine conjugated oligonucleotides; U.S. Pat. No. 5,212,295, drawn to monomers for the preparation of oligonucleotides having chiral phosphorus linkages; U.S. Pat. Nos. 5,378,825 and 5,541,307, drawn to oligonucleotides having modified backbones; U.S. Pat. No. 5,386,023, drawn to backbone-modified oligonucleotides and the preparation thereof through reductive coupling; U.S. Pat. No. 5,457,191, drawn to modified nucleobases based on the 3-deazapurine ring system and methods of synthesis thereof; U.S. Pat. No. 5,459,255, drawn to modified nucleobases based on N-2 substituted purines; U.S. Pat. No. 5,521,302, drawn to processes for preparing oligonucleotides having chiral phosphorus linkages; U.S. Pat. No. 5,539,082, drawn to peptide nucleic acids; U.S. Pat. No. 5,554,746, drawn to oligonucleotides having β-lactam backbones; U.S. Pat. No. 5,571,902, drawn to methods and materials for the synthesis of oligonucleotides; U.S. Pat. No. 5,578,718, drawn to nucleosides having alkylthio groups, wherein such groups may be used as linkers to other moieties attached at any of a variety of positions of the nucleoside; U.S. Pat. Nos. 5,587,361 and 5,599,797, drawn to oligonucleotides having phosphorothioate linkages of high chiral purity; U.S. Pat. No. 5,506,351, drawn to processes for the preparation of 2′-O-alkyl guanosine and related compounds, including 2,6-diaminopurine compounds; U.S. Pat. No. 5,587,469, drawn to oligonucleotides having N-2 substituted purines; U.S. Pat. No. 5,587,470, drawn to oligonucleotides having 3-deazapurines; U.S. Pat. Nos. 5,223,168, and 5,608,046, both drawn to conjugated 4′-desmethyl nucleoside analogs; U.S. Pat. Nos. 5,602,240, and 5,610,289, drawn to backbone-modified oligonucleotide analogs; U.S. Pat. Nos. 6,262,241, and 5,459,255, drawn to, inter alia, methods of synthesizing 2′-fluoro-oligonucleotides.

[0073] In the ligand-conjugated dsRNA and ligand-molecule bearing sequence-specific linked nucleosides of the invention, the oligonucleotides and oligonucleosides may be assembled on a suitable DNA synthesizer utilizing standard nucleotide or nucleoside precursors, or nucleotide or nucleoside conjugate precursors that already bear the linking moiety, ligand-nucleotide or nucleoside-conjugate precursors that already bear the ligand molecule, or non-nucleoside ligand-bearing building blocks.

[0074] When using nucleotide-conjugate precursors that already bear a linking moiety, the synthesis of the sequence-specific linked nucleosides is typically completed, and the ligand molecule is then reacted with the linking moiety to form the ligand-conjugated oligonucleotide. Oligonucleotide conjugates bearing a variety of molecules such as steroids, vitamins, lipids and reporter molecules, has previously been described (see Manoharan et al., PCT Application WO 93/07883). In a preferred embodiment, the oligonucleotides or linked nucleosides of the invention are synthesized by an automated synthesizer using phosphoramidites derived from ligand-nucleoside conjugates in addition to the standard phosphoramidites and non-standard phosphoramidites that are commercially available and routinely used in oligonucleotide synthesis.

[0075] The incorporation of a 2′-O-methyl, 2′-O-ethyl, 2′-O-propyl, 2′-O-allyl, 2′-O-aminoalkyl or 2′-deoxy-2′-fluoro group in nucleosides of an oligonucleotide confers enhanced hybridization properties to the oligonucleotide. Further, oligonucleotides containing phosphorothioate backbones have enhanced nuclease stability. Thus, functionalized, linked nucleosides of the invention can be augmented to include either or both a phosphorothioate backbone or a 2′-O-methyl, 2′-O-ethyl, 2′-O-propyl, 2′-O-aminoalkyl, 2′-O-allyl or 2′-deoxy-2′-fluoro group. A summary listing of some of the oligonucleotide modifications known in the art is found at, for example, PCT Publication WO 200370918.

[0076] In some embodiments, functionalized nucleoside sequences of the invention possessing an amino group at the 5′-terminus are prepared using a DNA synthesizer, and then reacted with an active ester derivative of a selected ligand. Active ester derivatives are well known to those skilled in the art. Representative active esters include N-hydrosuccinimide esters, tetrafluorophenolic esters, pentafluorophenolic esters and pentachlorophenolic esters. The reaction of the amino group and the active ester produces an oligonucleotide in which the selected ligand is attached to the 5′-position through a linking group. The amino group at the 5′-terminus can be prepared utilizing a 5′-Amino-Modifier C6 reagent. In one embodiment, ligand molecules may be conjugated to oligonucleotides at the 5′-position by the use of a ligand-nucleoside phosphoramidite wherein the ligand is linked to the 5′-hydroxy group directly or indirectly via a linker. Such ligand-nucleoside phosphoramidites are typically used at the end of an automated synthesis procedure to provide a ligand-conjugated oligonucleotide bearing the ligand at the 5′-terminus.

[0077] Examples of modified internucleoside linkages or backbones include, for example, phosphorothioates, chiral phosphorothioates, phosphorodithioates, phosphotriesters, aminoalkylphosphotriesters, methyl and other alkyl phosphonates including 3′-alkylene phosphonates and chiral phosphonates, phosphinates, phosphoramidates including 3′-amino phosphoramidate and aminoalkylphosphoramidates, thionophosphoramidates, thionoalkylphosphonates, thionoalkylphosphotriesters, and boranophosphates having normal 3′-5′ linkages, 2′-5′ linked analogs of these, and those having inverted polarity wherein the adjacent pairs of nucleoside units are linked 3′-5′ to 5′-3′ or 2′-5′ to 5′-2′. Various salts, mixed salts and free-acid forms are also included.

[0078] Representative United States Patents relating to the preparation of the above phosphorus-atom-containing linkages include, but are not limited to, U.S. Pat. Nos. 3,687,808; 4,469,863; 4,476,301; 5,023,243; 5,177,196; 5,188,897; 5,264,423; 5,276,019; 5,278,302; 5,286,717; 5,321,131; 5,399,676; 5,405,939; 5,453,496; 5,455,233; 5,466,677; 5,476,925; 5,519,126; 5,536,821; 5,541,306; 5,550,111; 5,563,253; 5,571,799; 5,587,361; 5,625,050; and 5,697,248, each of which is herein incorporated by reference.

[0079] Examples of modified internucleoside linkages or backbones that do not include a phosphorus atom therein (i.e., oligonucleotides) have backbones that are formed by short chain alkyl or cycloalkyl intersugar linkages, mixed heteroatom and alkyl or cycloalkyl intersugar linkages, or one or more short chain heteroatomic or heterocyclic intersugar linkages. These include those having morpholino linkages (formed in part from the sugar portion of a nucleoside); siloxane backbones; sulfide, sulfoxide and sulfone backbones; formacetyl and thioformacetyl backbones; methylene formacetyl and thioformacetyl backbones; alkene containing backbones; sulfamate backbones; methyleneimino and methylenehydrazino backbones; sulfonate and sulfonamide backbones; amide backbones; and others having mixed N, O, S and CH₂ component parts.

[0080] Representative United States patents relating to the preparation of the above oligonucleosides include, but are not limited to, U.S. Pat. Nos. 5,034,506; 5,166,315; 5,185,444; 5,214,134; 5,216,141; 5,235,033; 5,264,562; 5,264,564; 5,405,938; 5,434,257; 5,466,677; 5,470,967; 5,489,677; 5,541,307; 5,561,225; 5,596,086; 5,602,240; 5,610,289; 5,602,240; 5,608,046; 5,610,289; 5,618,704; 5,623,070; 5,663,312; 5,633,360; 5,677,437; and 5,677,439, each of which is herein incorporated by reference.

[0081] In certain instances, the oligonucleotide may be modified by a non-ligand group. A number of non-ligand molecules have been conjugated to oligonucleotides in order to enhance the activity, cellular distribution or cellular uptake of the oligonucleotide, and procedures for performing such conjugations are available in the scientific literature. Such non-ligand moieties have included lipid moieties, such as cholesterol (Letsinger et al., Proc. Natl. Acad. Sci. USA, 1989, 86:6553), cholic acid (Manoharan et al., Bioorg. Med. Chem. Lett., 1994, 4:1053), a thioether, e.g., hexyl-S-tritylthiol (Manoharan et al., Ann. N.Y. Acad. Sci., 1992, 660:306; Manoharan et al., Bioorg. Med. Chem. Let., 1993, 3:2765), a thiocholesterol (Oberhauser et al., Nucl. Acids Res., 1992, 20:533), an aliphatic chain, e.g., dodecandiol or undecyl residues (Saison-Behmoaras et al., EMBO J., 1991, 10:111; Kabanov et al., FEBS Lett., 1990, 259:327; Svinarchuk et al., Biochimie, 1993, 75:49), a phospholipid, e.g., di-hexadecyl-rac-glycerol or triethylammonium 1,2-di-O-hexadecyl-rac-glycero-3-H-phosphonate (Manoharan et al., Tetrahedron Lett., 1995, 36:3651; Shea et al., Nucl. Acids Res., 1990, 18:3777), a polyamine or a polyethylene glycol chain (Manoharan et al., Nucleosides & Nucleotides, 1995, 14:969), or adamantane acetic acid (Manoharan et al., Tetrahedron Lett., 1995, 36:3651), a palmityl moiety (Mishra et al., Biochim. Biophys. Acta, 1995, 1264:229), or an octadecylamine or hexylamino-carbonyl-oxycholesterol moiety (Crooke et al., J. Pharmacol. Exp. Ther., 1996, 277:923). Representative United States patents that teach the preparation of such oligonucleotide conjugates have been listed above. Typical conjugation protocols involve the synthesis of oligonucleotides bearing an aminolinker at one or more positions of the sequence. The amino group is then reacted with the molecule being conjugated using appropriate coupling or activating reagents. The conjugation reaction may be performed either with the oligonucleotide still bound to the solid support or following cleavage of the oligonucleotide in solution phase. Purification of the oligonucleotide conjugate by HPLC typically affords the pure conjugate. The use of a cholesterol conjugate is particularly preferred since such a moiety can increase targeting liver cells cells, a site of PCSK9 expression.

### Vector Encoded RNAi Agents

[0082] The dsRNA of the invention can also be expressed from recombinant viral vectors intracellularly in vivo. The recombinant viral vectors of the invention comprise sequences encoding the dsRNA of the invention and any suitable promoter for expressing the dsRNA sequences. Suitable promoters include, for example, the U6 or H1 RNA pol III promoter sequences and the cytomegalovirus promoter. Selection of other suitable promoters is within the skill in the art. The recombinant viral vectors of the invention can also comprise inducible or regulatable promoters for expression of the dsRNA in a particular tissue or in a particular intracellular environment. The use of recombinant viral vectors to deliver dsRNA of the invention to cells in vivo is discussed in more detail below.

[0083] dsRNA of the invention can be expressed from a recombinant viral vector either as two separate, complementary RNA molecules, or as a single RNA molecule with two complementary regions.

[0084] Any viral vector capable of accepting the coding sequences for the dsRNA molecule(s) to be expressed can be used, for example vectors derived from adenovirus (AV); adeno-associated virus (AAV); retroviruses (e.g, lentiviruses (LV), Rhabdoviruses, murine leukemia virus); herpes virus, and the like. The tropism of viral vectors can be modified by pseudotyping the vectors with envelope proteins or other surface antigens from other viruses, or by substituting different viral capsid proteins, as appropriate.

[0085] For example, lentiviral vectors of the invention can be pseudotyped with surface proteins from vesicular stomatitis virus (VSV), rabies, Ebola, Mokola, and the like. AAV vectors of the invention can be made to target different cells by engineering the vectors to express different capsid protein serotypes. For example, an AAV vector expressing a serotype 2 capsid on a serotype 2 genome is called AAV 2/2. This serotype 2 capsid gene in the AAV 2/2 vector can be replaced by a serotype 5 capsid gene to produce an AAV 2/5 vector. Techniques for constructing AAV vectors which express different capsid protein serotypes are within the skill in the art; see, e.g., Rabinowitz J E et al. (2002), J Virol 76:791-801, the entire disclosure of which is herein incorporated by reference.

[0086] Selection of recombinant viral vectors suitable for use in the invention, methods for inserting nucleic acid sequences for expressing the dsRNA into the vector, and methods of delivering the viral vector to the cells of interest are within the skill in the art. See, for example, Dornburg R (1995), Gene Therap. 2: 301-310; Eglitis M A (1988), Biotechniques 6: 608-614; Miller A D (1990), Hum Gene Therap. 1: 5-14; Anderson W F (1998), Nature 392: 25-30; and Rubinson D A et al., Nat. Genet. 33: 401-406, the entire disclosures of which are herein incorporated by reference.

[0087] Preferred viral vectors are those derived from AV and AAV. In a particularly preferred embodiment, the dsRNA of the invention is expressed as two separate, complementary single-stranded RNA molecules from a recombinant AAV vector comprising, for example, either the U6 or H1 RNA promoters, or the cytomegalovirus (CMV) promoter.

[0088] A suitable AV vector for expressing the dsRNA of the invention, a method for constructing the recombinant AV vector, and a method for delivering the vector into target cells, are described in Xia H et al. (2002), Nat. Biotech. 20: 1006-1010.

[0089] Suitable AAV vectors for expressing the dsRNA of the invention, methods for constructing the recombinant AV vector, and methods for delivering the vectors into target cells are described in Samulski R et al. (1987), J. Virol. 61: 3096-3101; Fisher K J et al. (1996), J. Virol, 70: 520-532; Samulski R et al. (1989), J. Virol. 63: 3822-3826; U.S. Pat. Nos. 5,252,479; 5,139,941; International Patent Application No. WO 94/13788; and International Patent Application No. WO 93/24641, the entire disclosures of which are herein incorporated by reference.

### III. Pharmaceutical Compositions Comprising dsRNA

[0090] In one embodiment, the invention provides pharmaceutical compositions comprising a dsRNA, as described herein, and a pharmaceutically acceptable carrier. The pharmaceutical composition comprising the dsRNA is useful for treating a disease or disorder associated with the expression or activity of the PCSK9 gene, such as pathological processes which can be mediated by down regulating PCSK9 gene expression, sucxh as hyperlipidemia. Such pharmaceutical compositions are formulated based on the mode of delivery. One example is compositions that are formulated for delivery to the liver via parenteral delivery.

[0091] The pharmaceutical compositions of the invention are administered in dosages sufficient to inhibit expression of the PCSK9 gene. The present inventors have found that, because of their improved efficiency, compositions comprising the dsRNA of the invention can be administered at surprisingly low dosages. A dosage of 5 mg dsRNA per kilogram body weight of recipient per day is sufficient to inhibit or suppress expression of the PCSK9 gene and may be administered systemically to the patient.

[0092] In general, a suitable dose of dsRNA will be in the range of 0.01 to 5.0 milligrams per kilogram body weight of the recipient per day, generally in the range of 1 microgram to 1 mg per kilogram body weight per day. The pharmaceutical composition may be administered once daily, or the dsRNA may be administered as two, three, or more sub-doses at appropriate intervals throughout the day or even using continuous infusion or delivery through a controlled release formulation. In that case, the dsRNA contained in each sub-dose must be correspondingly smaller in order to achieve the total daily dosage. The dosage unit can also be compounded for delivery over several days, e.g., using a conventional sustained release formulation which provides sustained release of the dsRNA over a several day period. Sustained release formulations are well known in the art.

[0093] The skilled artisan will appreciate that certain factors may influence the dosage and timing required to effectively treat a subject, including but not limited to the severity of the disease or disorder, previous treatments, the general health and/or age of the subject, and other diseases present. Moreover, treatment of a subject with a therapeutically effective amount of a composition can include a single treatment or a series of treatments. Estimates of effective dosages and in vivo half-lives for the individual dsRNAs encompassed by the invention can be made using conventional methodologies or on the basis of in vivo testing using an appropriate animal model, as described elsewhere herein.

[0094] Advances in mouse genetics have generated a number of mouse models for the study of various human diseases, such as pathological processes which can be mediated by down regulating PCSK9 gene expression. Such models are used for in vivo testing of dsRNA, as well as for determining a therapeutically effective dose.

[0095] Any method can be used to administer a dsRNA of the present invention to a mammal. For example, administration can be direct; oral; or parenteral (e.g., by subcutaneous, intraventricular, intramuscular, or intraperitoneal injection, or by intravenous drip). Administration can be rapid (e.g., by injection), or can occur over a period of time (e.g., by slow infusion or administration of slow release formulations).

[0096] Typically, when treating a mammal with hyperlipidemia, the dsRNA molecules are administered systemically via parental means. For example, dsRNAs, conjugated or unconjugate or formulated with or without liposomes, can be administered intravenously to a patient. For such, a dsRNA molecule can be formulated into compositions such as sterile and non-sterile aqueous solutions, non-aqueous solutions in common solvents such as alcohols, or solutions in liquid or solid oil bases. Such solutions also can contain buffers, diluents, and other suitable additives. For parenteral, intrathecal, or intraventricular administration, a dsRNA molecule can be formulated into compositions such as sterile aqueous solutions, which also can contain buffers, diluents, and other suitable additives (e.g., penetration enhancers, carrier compounds, and other pharmaceutically acceptable carriers).

[0097] In addition, dsRNA molecules can be administered to a mammal as biologic or abiologic means as described in, for example, U.S. Pat. No. 6,271,359. Abiologic delivery can be accomplished by a variety of methods including, without limitation, (1) loading liposomes with a dsRNA acid molecule provided herein and (2) complexing a dsRNA molecule with lipids or liposomes to form nucleic acid-lipid or nucleic acid-liposome complexes. The liposome can be composed of cationic and neutral lipids commonly used to transfect cells in vitro. Cationic lipids can complex (e.g., charge-associate) with negatively charged nucleic acids to form liposomes. Examples of cationic liposomes include, without limitation, lipofectin, lipofectamine, lipofectace, and DOTAP. Procedures for forming liposomes are well known in the art. Liposome compositions can be formed, for example, from phosphatidylcholine, dimyristoyl phosphatidylcholine, dipalmitoyl phosphatidylcholine, dimyristoyl phosphatidylglycerol, or dioleoyl phosphatidylethanolamine. Numerous lipophilic agents are commercially available, including Lipofectin.®. (Invitrogen/Life Technologies, Carlsbad, Calif.) and Effectene.™. (Qiagen, Valencia, Calif.). In addition, systemic delivery methods can be optimized using commercially available cationic lipids such as DDAB or DOTAP, each of which can be mixed with a neutral lipid such as DOPE or cholesterol. In some cases, liposomes such as those described by Templeton et al. (Nature Biotechnology, 15: 647-652 (1997)) can be used. In other embodiments, polycations such as polyethyleneimine can be used to achieve delivery in vivo and ex vivo (Boletta et al., J. Am Soc. Nephrol. 7: 1728 (1996)). Additional information regarding the use of liposomes to deliver nucleic acids can be found in U.S. Pat. No. 6,271,359, PCT Publication WO 96/40964 and Morrissey, D. et al. 2005. Nat Biotechnol. 23(8):1002-7.

[0098] Biologic delivery can be accomplished by a variety of methods including, without limitation, the use of viral vectors. For example, viral vectors (e.g., adenovirus and herpesvirus vectors) can be used to deliver dsRNA molecules to liver cells. Standard molecular biology techniques can be used to introduce one or more of the dsRNAs provided herein into one of the many different viral vectors previously developed to deliver nucleic acid to cells. These resulting viral vectors can be used to deliver the one or more dsRNAs to cells by, for example, infection.

[0099] dsRNAs of the present invention can be formulated in a pharmaceutically acceptable carrier or diluent. A “pharmaceutically acceptable carrier” (also referred to herein as an “excipient”) is a pharmaceutically acceptable solvent, suspending agent, or any other pharmacologically inert vehicle. Pharmaceutically acceptable carriers can be liquid or solid, and can be selected with the planned manner of administration in mind so as to provide for the desired bulk, consistency, and other pertinent transport and chemical properties. Typical pharmaceutically acceptable carriers include, by way of example and not limitation: water; saline solution; binding agents (e.g., polyvinylpyrrolidone or hydroxypropyl methylcellulose); fillers (e.g., lactose and other sugars, gelatin, or calcium sulfate); lubricants (e.g., starch, polyethylene glycol, or sodium acetate); disintegrates (e.g., starch or sodium starch glycolate); and wetting agents (e.g., sodium lauryl sulfate).

[0100] In addition, dsRNA that target the PCSK9 gene can be formulated into compositions containing the dsRNA admixed, encapsulated, conjugated, or otherwise associated with other molecules, molecular structures, or mixtures of nucleic acids. For example, a composition containing one or more dsRNA agents that target the PCSK9 gene can contain other therapeutic agents such as othr lipid lowering agents (e.g., statins).

### Methods for Treating Diseases That Can Be Modulated by Down Regulating the Expression of PCSK9

[0101] The methods and compositions described herein can be used to treat diseases and conditions that can be modulated by down regulating PCSK9 gene expression. For example, the compositions described herein can be used to treat hyperlipidemia and other forms of lipid inbalance such as hypercholesterolemia, hypertriglyceridemia and the pathological conditions associated with thiese disorders such as heart and circulatory diseases.

### Methods for Inhibiting Expression of the PCSK9 Gene

[0102] In yet another aspect, the invention provides a method for inhibiting the expression of the PCSK9 gene in a mammal. The method comprises administering a composition of the invention to the mammal such that expression of the target PCSK9 gene is silenced. Because of their high specificity, the dsRNAs of the invention specifically target RNAs (primary or processed) of the target PCSK9 gene. Compositions and methods for inhibiting the expression of these PCSK9 genes using dsRNAs can be performed as described elsewhere herein.

[0103] In one embodiment, the method comprises administering a composition comprising a dsRNA, wherein the dsRNA comprises a nucleotide sequence which is complementary to at least a part of an RNA transcript of the PCSK9 gene of the mammal to be treated. When the organism to be treated is a mammal such as a human, the composition may be administered by any means known in the art including, but not limited to oral or parenteral routes, including intravenous, intramuscular, subcutaneous, transdermal, airway (aerosol) administration. In preferred embodiments, the compositions are administered by intravenous infusion or injection.

[0104] Unless otherwise defined, all technical and scientific terms used herein have the same meaning as commonly understood by one of ordinary skill in the art to which this invention belongs. Although methods and materials similar or equivalent to those described herein can be used in the practice or testing of the invention, suitable methods and materials are described below. All publications, patent applications, patents, and other references mentioned herein are incorporated by reference in their entirety. In case of conflict, the present specification, including definitions, will control. In addition, the materials, methods, and examples are illustrative only and not intended to be limiting.

### EXAMPLES

### Gene Walking of the PCSK9 Gene

[0105] siRNA design was carried out to identify in two separate selections

[0106] a) siRNAs targeting PCSK9 human and either mouse or rat mRNA and

[0107] b) all human reactive siRNAs with predicted specificity to the target gene PCSK9.

[0108] mRNA sequences to human, mouse and rat PCSK9 were used: Human sequence NM_174936.2 was used as reference sequence during the complete siRNA selection procedure.

[0109] 19 mer stretches conserved in human and mouse, and human and rat PCSK9 mRNA sequences were identified in the first step, resulting in the selection of siRNAs crossreactive to human and mouse, and siRNAs crossreactive to human and rat targets

[0110] SiRNAs specifically targeting human PCSK9 were identified in a second selection. All potential 19mer sequences of human PCSK9 were extracted and defined as candidate target sequences. Sequences cross-reactive to human, monkey, and those cross-reactive to mouse, rat, human and monkey are all listed in Tables 1 and 2. Chemically modified versions of those sequences and their activity in both in vitro and in vivo assays are also listed in tables 1 and 2 and examples given in FIGS. 2-8.

[0111] In order to rank candidate target sequences and their corresponding siRNAs and select appropriate ones, their predicted potential for interacting with irrelevant targets (off-target potential) was taken as a ranking parameter. siRNAs with low off-target potential were defined as preferable and assumed to be more specific in vivo.

[0112] For predicting siRNA-specific off-target potential, the following assumptions were made:

[0113] 1) positions 2 to 9 (counting 5′ to 3′) of a strand (seed region) may contribute more to off-target potential than rest of sequence (non-seed and cleavage site region)

[0114] 2) positions 10 and 11 (counting 5′ to 3′) of a strand (cleavage site region) may contribute more to off-target potential than non-seed region

[0115] 3) positions 1 and 19 of each strand are not relevant for off-target interactions

[0116] 4) an off-target score can be calculated for each gene and each strand, based on complementarity of siRNA strand sequence to the gene's sequence and position of mismatches

[0117] 5) number of predicted off-targets as well as highest off-target score must be considered for off-target potential

[0118] 6) off-target scores are to be considered more relevant for off-target potential than numbers of off-targets

[0119] 7) assuming potential abortion of sense strand activity by internal modifications introduced, only off-target potential of antisense strand will be relevant

[0120] To identify potential off-target genes, 19mer candidate sequences were subjected to a homology search against publically available human mRNA sequences.

[0121] The following off-target properties for each 19mer input sequence were extracted for each off-target gene to calculate the off-target score:

[0122] Number of mismatches in non-seed region

[0123] Number of mismatches in seed region

[0124] Number of mismatches in cleavage site region

[0125] The off-target score was calculated for considering assumption 1 to 3 as follows:

Off-target score=number of seed mismatches*10+number of cleavage site mismatches*1.2+number of non-seed mismatches*1

[0126] The most relevant off-target gene for each siRNA corresponding to the input 19mer sequence was defined as the gene with the lowest off-target score. Accordingly, the lowest off-target score was defined as the relevant off-target score for each siRNA.

### dsRNA Synthesis

### Source of Reagents

[0127] Where the source of a reagent is not specifically given herein, such reagent may be obtained from any supplier of reagents for molecular biology at a quality/purity standard for application in molecular biology.

### siRNA Synthesis

[0128] Single-stranded RNAs were produced by solid phase synthesis on a scale of 1 μmole using an Expedite 8909 synthesizer (Applied Biosystems, Applera Deutschland GmbH, Darmstadt, Germany) and controlled pore glass (CPG, 500 Å, Proligo Biochemie GmbH, Hamburg, Germany) as solid support. RNA and RNA containing 2′-O-methyl nucleotides were generated by solid phase synthesis employing the corresponding phosphoramidites and 2′-O-methyl phosphoramidites, respectively (Proligo Biochemie GmbH, Hamburg, Germany). These building blocks were incorporated at selected sites within the sequence of the oligoribonucleotide chain using standard nucleoside phosphoramidite chemistry such as described in Current protocols in nucleic acid chemistry, Beaucage, S. L. et al. (Edrs.), John Wiley & Sons, Inc., New York, N.Y., USA. Phosphorothioate linkages were introduced by replacement of the iodine oxidizer solution with a solution of the Beaucage reagent (Chruachem Ltd, Glasgow, UK) in acetonitrile (1%). Further ancillary reagents were obtained from Mallinckrodt Baker (Griesheim, Germany).

[0129] Deprotection and purification of the crude oligoribonucleotides by anion exchange HPLC were carried out according to established procedures. Yields and concentrations were determined by UV absorption of a solution of the respective RNA at a wavelength of 260 nm using a spectral photometer (DU 640B, Beckman Coulter GmbH, Unterschleiβheim, Germany). Double stranded RNA was generated by mixing an equimolar solution of complementary strands in annealing buffer (20 mM sodium phosphate, pH 6.8; 100 mM sodium chloride), heated in a water bath at 85-90° C. for 3 minutes and cooled to room temperature over a period of 3-4 hours. The annealed RNA solution was stored at −20° C. until use.

[0130] For the synthesis of 3′-cholesterol-conjugated siRNAs (herein referred to as -Chol-3), an appropriately modified solid support was used for RNA synthesis. The modified solid support was prepared as follows:

### Diethyl-2-azabutane-1,4-dicarboxylate AA

[chemical structure]

[0132] A 4.7 M aqueous solution of sodium hydroxide (50 mL) was added into a stirred, ice-cooled solution of ethyl glycinate hydrochloride (32.19 g, 0.23 mole) in water (50 mL). Then, ethyl acrylate (23.1 g, 0.23 mole) was added and the mixture was stirred at room temperature until completion of the reaction was ascertained by TLC. After 19 h the solution was partitioned with dichloromethane (3×100 mL). The organic layer was dried with anhydrous sodium sulfate, filtered and evaporated. The residue was distilled to afford AA (28.8 g, 61%).

### 3-{Ethoxycarbonylmethyl-[6-(9H-fluoren-9-ylmethoxycarbonyl-amino)-hexanoyl]-amino}-propionic acid ethyl ester AB

[chemical structure]

[0134] Fmoc-6-amino-hexanoic acid (9.12 g, 25.83 mmol) was dissolved in dichloromethane (50 mL) and cooled with ice. Diisopropylcarbodiimde (3.25 g, 3.99 mL, 25.83 mmol) was added to the solution at 0° C. It was then followed by the addition of Diethyl-azabutane-1,4-dicarboxylate (5 g, 24.6 mmol) and dimethylamino pyridine (0.305 g, 2.5 mmol). The solution was brought to room temperature and stirred further for 6 h. Completion of the reaction was ascertained by TLC. The reaction mixture was concentrated under vacuum and ethyl acetate was added to precipitate diisopropyl urea. The suspension was filtered. The filtrate was washed with 5% aqueous hydrochloric acid, 5% sodium bicarbonate and water. The combined organic layer was dried over sodium sulfate and concentrated to give the crude product which was purified by column chromatography (50% EtOAC/Hexanes) to yield 11.87 g (88%) of AB.

### 3-[(6-Amino-hexanoyl)-ethoxycarbonylmethyl-amino]-propionic acid ethyl ester AC

[chemical structure]

[0136] 3-{Ethoxycarbonylmethyl-[6-(9H-fluoren-9-ylmethoxycarbonylamino)-hexanoyl]-amino}-propionic acid ethyl ester AB (11.5 g, 21.3 mmol) was dissolved in 20% piperidine in dimethylformamide at 0° C. The solution was continued stirring for 1 h. The reaction mixture was concentrated under vacuum, water was added to the residue, and the product was extracted with ethyl acetate. The crude product was purified by conversion into its hydrochloride salt.

### 3-({6-[17-(1,5-Dimethyl-hexyl)-10,13-dimethyl-2,3,4,7,8,9,10,11,12,13,14,15,16,17-tetradecahydro-1H-cyclopenta[a]phenanthren-3-yloxycarbonylamino]-hexanoyl}ethoxycarbonylmethyl-amino)-propionic acid ethyl ester AD

[chemical structure]

[0138] The hydrochloride salt of 3-[(6-Amino-hexanoyl)-ethoxycarbonylmethyl-amino]-propionic acid ethyl ester AC (4.7 g, 14.8 mmol) was taken up in dichloromethane. The suspension was cooled to 0° C. on ice. To the suspension diisopropylethylamine (3.87 g, 5.2 mL, 30 mmol) was added. To the resulting solution cholesteryl chloroformate (6.675 g, 14.8 mmol) was added. The reaction mixture was stirred overnight. The reaction mixture was diluted with dichloromethane and washed with 10% hydrochloric acid. The product was purified by flash chromatography (10.3 g, 92%).

### 1-{6-[17-(1,5-Dimethyl-hexyl)-10,13-dimethyl-2,3,4,7,8,9,10,11,12,13,14,15,16,17-tetradecahydro-1H-cyclopenta[a] phenanthren-3-yloxycarbonylamino]-hexanoyl}-4-oxo-pyrrolidine-3-carboxylic acid ethyl ester AE

[chemical structure]

[0140] Potassium t-butoxide (1.1 g, 9.8 mmol) was slurried in 30 mL of dry toluene. The mixture was cooled to 0° C. on ice and 5 g (6.6 mmol) of diester AD was added slowly with stirring within 20 mins. The temperature was kept below 5° C. during the addition. The stirring was continued for 30 mins at 0° C. and 1 mL of glacial acetic acid was added, immediately followed by 4 g of NaH₂PO₄.H₂O in 40 mL of water The resultant mixture was extracted twice with 100 mL of dichloromethane each and the combined organic extracts were washed twice with 10 mL of phosphate buffer each, dried, and evaporated to dryness. The residue was dissolved in 60 mL of toluene, cooled to 0° C. and extracted with three 50 mL portions of cold pH 9.5 carbonate buffer. The aqueous extracts were adjusted to pH 3 with phosphoric acid, and extracted with five 40 mL portions of chloroform which were combined, dried and evaporated to dryness. The residue was purified by column chromatography using 25% ethylacetate/hexane to afford 1.9 g of b-ketoester (39%).

### [6-(3-Hydroxy-4-hydroxymethyl-pyrrolidin-1-yl)-6-oxo-hexyl]-carbamic acid 17-(1,5-dimethyl-hexyl)-10,13-dimethyl-2,3,4,7,8,9,10,11,12,13,14,15,16,17-tetradecahydro-1H-cyclopenta[a]phenanthren-3-yl ester AF

[chemical structure]

[0142] Methanol (2 mL) was added dropwise over a period of 1 h to a refluxing mixture of b-ketoester AE (1.5 g, 2.2 mmol) and sodium borohydride (0.226 g, 6 mmol) in tetrahydrofuran (10 mL). Stirring was continued at reflux temperature for 1 h. After cooling to room temperature, 1 N HCl (12.5 mL) was added, the mixture was extracted with ethylacetate (3×40 mL). The combined ethylacetate layer was dried over anhydrous sodium sulfate and concentrated under vacuum to yield the product which was purified by column chromatography (10% MeOH/CHCl₃) (89%).

### (6-{3-[Bis-(4-methoxy-phenyl)-phenyl-methoxymethyl]-4-hydroxy-pyrrolidin-1-yl}-6-oxo-hexyl)-carbamic acid 17-(1,5-dimethyl-hexyl)-10,13-dimethyl-2,3,4,7,8,9,10,11,12,13,14,15,16,17-tetradecahydro-1H-cyclopenta[a]phenanthren-3-yl ester AG

[chemical structure]

[0144] Diol AF (1.25 gm 1.994 mmol) was dried by evaporating with pyridine (2×5 mL) in vacuo. Anhydrous pyridine (10 mL) and 4,4′-dimethoxytritylchloride (0.724 g, 2.13 mmol) were added with stirring. The reaction was carried out at room temperature overnight. The reaction was quenched by the addition of methanol. The reaction mixture was concentrated under vacuum and to the residue dichloromethane (50 mL) was added. The organic layer was washed with 1M aqueous sodium bicarbonate. The organic layer was dried over anhydrous sodium sulfate, filtered and concentrated. The residual pyridine was removed by evaporating with toluene. The crude product was purified by column chromatography (2% MeOH/Chloroform, Rf=0.5 in 5% MeOH/CHCl₃) (1.75 g, 95%).

### Succinic acid mono-(4-[bis-(4-methoxy-phenyl)-phenyl-methoxymethyl]-1-{6-[17-(1,5-dimethyl-hexyl)-10,13-dimethyl 2,3,4,7,8,9,10,11,12,13,14,15,16,17-tetradecahydro-1H cyclopenta[a]phenanthren-3-yloxycarbonylamino]-hexanoyl}-pyrrolidin-3-yl) ester AH

[chemical structure]

[0146] Compound AG (1.0 g, 1.05 mmol) was mixed with succinic anhydride (0.150 g, 1.5 mmol) and DMAP (0.073 g, 0.6 mmol) and dried in a vacuum at 40° C. overnight. The mixture was dissolved in anhydrous dichloroethane (3 mL), triethylamine (0.318 g, 0.440 mL, 3.15 mmol) was added and the solution was stirred at room temperature under argon atmosphere for 16 h. It was then diluted with dichloromethane (40 mL) and washed with ice cold aqueous citric acid (5 wt %, 30 mL) and water (2×20 mL). The organic phase was dried over anhydrous sodium sulfate and concentrated to dryness. The residue was used as such for the next step.

### Cholesterol Derivatised CPG AI

[chemical structure]

[0148] Succinate AH (0.254 g, 0.242 mmol) was dissolved in a mixture of dichloromethane/acetonitrile (3:2, 3 mL). To that solution DMAP (0.0296 g, 0.242 mmol) in acetonitrile (1.25 mL), 2,2′-Dithio-bis(5-nitropyridine) (0.075 g, 0.242 mmol) in acetonitrile/dichloroethane (3:1, 1.25 mL) were added successively. To the resulting solution triphenylphosphine (0.064 g, 0.242 mmol) in acetonitrile (0.6 ml) was added. The reaction mixture turned bright orange in color. The solution was agitated briefly using a wrist-action shaker (5 mins). Long chain alkyl amine-CPG (LCAA-CPG) (1.5 g, 61 mM) was added. The suspension was agitated for 2 h. The CPG was filtered through a sintered funnel and washed with acetonitrile, dichloromethane and ether successively. Unreacted amino groups were masked using acetic anhydride/pyridine. The achieved loading of the CPG was measured by taking UV measurement (37 mM/g).

[0149] The synthesis of siRNAs bearing a 5′-12-dodecanoic acid bisdecylamide group (herein referred to as “5′-C32-”) or a 5′-cholesteryl derivative group (herein referred to as “5′-Chol-”) was performed as described in WO 2004/065601, except that, for the cholesteryl derivative, the oxidation step was performed using the Beaucage reagent in order to introduce a phosphorothioate linkage at the 5′-end of the nucleic acid oligomer.

[0150] Nucleic acid sequences are represented below using standard nomenclature, and specifically the abbreviations of Table 1-2.

### PCSK9 siRNA Screening in HuH7, HepG2, Hela and Primary Monkey Hepatocytes Discovers Highly Active Sequences

[0151] HuH-7 cells were obtained from JCRB Cell Bank (Japanese Collection of Research Bioresources) (Shinjuku, Japan, cat. No.: JCRB0403) Cells were cultured in Dulbecco's MEM (Biochrom AG, Berlin, Germany, cat. No. F0435) supplemented to contain 10% fetal calf serum (FCS) (Biochrom AG, Berlin, Germany, cat. No. S0115), Penicillin 100 U/ml, Streptomycin 100 μg/ml (Biochrom AG, Berlin, Germany, cat. No. A2213) and 2 mM L-Glutamin (Biochrom AG, Berlin, Germany, cat. No K0282) at 37° C. in an atmosphere with 5% CO₂ in a humidified incubator (Heraeus HERAcell, Kendro Laboratory Products, Langenselbold, Germany). HepG2 and Hela cells were obtained from American Type Culture Collection (Rockville, Md., cat. No. HB-8065) and cultured in MEM (Gibco Invitrogen, Karlsruhe, Germany, cat. No. 21090-022) supplemented to contain 10% fetal calf serum (FCS) (Biochrom AG, Berlin, Germany, cat. No. S0115), Penicillin 100 U/ml, Streptomycin 100 μg/ml (Biochrom AG, Berlin, Germany, cat. No. A2213), 1× Non Essential Amino Acids (Biochrom AG, Berlin, Germany, cat. No. K-0293), and 1 mM Sodium Pyruvate (Biochrom AG, Berlin, Germany, cat. No. L-0473) at 37° C. in an atmosphere with 5% CO₂ in a humidified incubator (Heraeus HERAcell, Kendro Laboratory Products, Langenselbold, Germany).

[0152] For transfection with siRNA, HuH7, HepG2, or Hela cells were seeded at a density of 2.0×10⁴ cells/well in 96-well plates and transfected directly. Transfection of siRNA (30 nM for single dose screen) was carried out with lipofectamine 2000 (Invitrogen GmbH, Karlsruhe, Germany, cat. No. 11668-019) as described by the manufacturer.

[0153] 24 hours after transfection HuH7 and HepG2 cells were lysed and PCSK9 mRNA levels were quantified with the Quantigene Explore Kit (Genosprectra, Dumbarton Circle Fremont, USA, cat. No. QG-000-02) according to the protocol. PCSK9 mRNA levels were normalized to GAP-DH mRNA. For each siRNA eight individual datapoints were collected. siRNA duplexes unrelated to PCSK9 gene were used as control. The activity of a given PCSK9 specific siRNA duplex was expressed as percent PCSK9 mRNA concentration in treated cells relative to PCSK9 mRNA concentration in cells treated with the control siRNA duplex.

[0154] Primary cynomolgus monkey hepatocytes (cryopreserved) were obtained from In vitro Technologies, Inc. (Baltimore, Md., USA, cat No M00305) and cultured in InVitroGRO CP Medium (cat No Z99029) at 37° C. in an atmosphere with 5% CO₂ in a humidified incubator.

[0155] For transfection with siRNA, primary cynomolgus monkey cells were seeded on Collagen coated plates (Fisher Scientific, cat. No. 08-774-5) at a density of 3.5×10⁴ cells/well in 96-well plates and transfected directly. Transfection of siRNA (eight 2-fold dilution series starting from 30 nM) in duplicates was carried out with lipofectamine 2000 (Invitrogen GmbH, Karlsruhe, Germany, cat. No. 11668-019) as described by the manufacturer.

[0156] 16 hours after transfection medium was changed to fresh InVitroGRO CP Medium with Torpedo Antibiotic Mix (In vitro Technologies, Inc, cat. No Z99000) added.

[0157] 24 hours after medium change primary cynomolgus monkey cells were lysed and PCSK9 mRNA levels were quantified with the Quantigene Explore Kit (Genosprectra, Dumbarton Circle Fremont, USA, cat. No. QG-000-02) according to the protocol. PCSK9 mRNA levels were normalized to GAPDH mRNA. Normalized PCSK9/GAPDH ratios were then compared to PCSK9/GAPDH ratio of lipofectamine 2000 only control.

[0158] Tables 1-2 (and FIG. 6) summarize the results and provides examples of in vitro screens in different cell lines at different doses. Silencing of PCSK9 transcript was expressed as percentage of remaining transcript at a given dose. Highly active sequences are those with less than 70% transcript remaining post treatment with a given siRNA at a dose less than or equal to 100 nm. Very active sequences are those that have less than 60% of transcript remaining after treatment with a dose.less than or equal to 100 nM. Active sequences are those that have less than 85% transcript remaining after treatment with a high dose (100 nM). Examples of active siRNA's were also screened in vivo in mouse in lipidoid formulations as described below. Active sequences in vitro were also generally active in vivo (See figure FIG. 6 example).

### In Vivo Efficacy Screen of PCSK9 siRNAs

### Formulation Procedure

[0159] The lipidoid LNP-01.4HCl (MW 1487) (FIG. 1), Cholesterol (Sigma-Aldrich), and PEG-Ceramide C16 (Avanti Polar Lipids) were used to prepare lipid-siRNA nanoparticles. Stock solutions of each in ethanol were prepared: LNP-01, 133 mg/mL; Cholesterol, 25 mg/mL, PEG-Ceramide C16, 100 mg/mL. LNP-01, Cholesterol, and PEG-Ceramide C16 stock solutions were then combined in a 42:48:10 molar ratio. Combined lipid solution was mixed rapidly with aqueous siRNA (in sodium acetate pH 5) such that the final ethanol concentration was 35-45% and the final sodium acetate concentration was 100-300 mM. Lipid-siRNA nanoparticles formed spontaneously upon mixing. Depending on the desired particle size distribution, the resultant nanoparticle mixture was in some cases extruded through a polycarbonate membrane (100 nm cut-off) using a thermobarrel extruder (Lipex Extruder, Northern Lipids, Inc). In other cases, the extrusion step was omitted. Ethanol removal and simultaneous buffer exchange was accomplished by either dialysis or tangential flow filtration. Buffer was exchanged to phosphate buffered saline (PBS) pH 7.2.

### Characterization of Formulations

[0160] Formulations prepared by either the standard or extrusion-free method are characterized in a similar manner. Formulations are first characterized by visual inspection. They should be whitish translucent solutions free from aggregates or sediment. Particle size and particle size distribution of lipid-nanoparticles are measured by dynamic light scattering using a Malvern Zetasizer Nano ZS (Malvern, USA). Particles should be 20-300 nm, and ideally, 40-100 nm in size. The particle size distribution should be unimodal. The total siRNA concentration in the formulation, as well as the entrapped fraction, is estimated using a dye exclusion assay. A sample of the formulated siRNA is incubated with the RNA-binding dye Ribogreen (Molecular Probes) in the presence or absence of a formulation disrupting surfactant, 0.5% Triton-X100. The total siRNA in the formulation is determined by the signal from the sample containing the surfactant, relative to a standard curve. The entrapped fraction is determined by subtracting the “free” siRNA content (as measured by the signal in the absence of surfactant) from the total siRNA content. Percent entrapped siRNA is typically >85%.

### Bolus Dosing

[0161] Bolus dosing of formulated siRNAs in C57/BL6 mice (5/group, 8-10 weeks old, Charles River Laboratories, MA) was performed by tail vein injection using a 27G needle. SiRNAs were formulated in LNP-01 (and then dialyzed against PBS) at 0.5 mg/ml concentration allowing the delivery of the 5 mg/kg dose in 10 μl/g body weight. Mice were kept under an infrared lamp for approximately 3 min prior to dosing to ease injection.

[0162] 48 hour post dosing mice were sacrificed by CO₂-asphyxiation. 0.2 ml blood was collected by retro-orbital bleeding and the liver was harvested and frozen in liquid nitrogen. Serum and livers were stored at −80° C.

[0163] Frozen livers were grinded using 6850 Freezer/Mill Cryogenic Grinder (SPEX CentriPrep, Inc) and powders stored at −80° C. until analysis.

[0164] PCSK9 mRNA levels were detected using the branched-DNA technology based kit from QuantiGene Reagent System (Genospectra) according to the protocol. 10-20 mg of frozen liver powders was lysed in 600 ul of 0.16 ug/ml Proteinase K (Epicentre, # MPRK092) in Tissue and Cell Lysis Solution (Epicentre, # MTC096H) at 65° C. for 3 hours. Then 10 ul of the lysates were added to 90 ul of Lysis Working Reagent (1 volume of stock Lysis Mixture in two volumes of water) and incubated at 52° C. overnight on Genospectra capture plates with probe sets specific to mouse PCSK9 and mouse GAPDH or cyclophilin B. Nucleic acid sequences for Capture Extender (CE), Label Extender (LE) and blocking (BL) probes were selected from the nucleic acid sequences of PCSK9, GAPDH and cyclophilin B with the help of the QuantiGene ProbeDesigner Software 2.0 (Genospectra, Fremont, Calif., USA, cat. No. QG-002-02). Chemo luminescence was read on a Victor2-Light (Perkin Elmer) as Relative light units. The ratio of PCSK9 mRNA to GAPDH or cyclophilin B mRNA in liver lysates was averaged over each treatment group and compared to a control group treated with PBS or a control group treated with an unrelated siRNA (blood coagulation factor VII).

[0165] Total serum cholesterol in mouse serum was measured using the StanBio Cholesterol LiquiColor kit (StanBio Laboratoriy, Boerne, Tex., USA) according to manufacturer's instructions. Measurements were taken on a Victor2 1420 Multilabel Counter (Perkin Elmer) at 495 nm.

### EXAMPLES

[0166] 32 PCSK9 siRNAs formulated in LNP-01 liposomes were tested in vivo in a mouse model. The experiment was performed at 5 mg/kg siRNA dose and at least 10 PCSK9 siRNAs showed more than 40% PCSK9 mRNA knock down compared to a control group treated with PBS, while control group treated with an unrelated siRNA (blood coagulation factor VII) had no effect (FIGS. 2-5). Silencing of PCSK9 transcript also coorelated with a lowering of cholesterol in these animals (FIGS. 4-5). In addition there was a strong coorelation between those molecules that were active in vitro and those active in vivo (FIG. 6). Sequences containing different chemical modifications were also screened in vitro (Tables 1 and 2) and in vivo. As an example, less modified sequences 9314 and 9318, and a more modified versions of that sequence 9314-(10792, 10793, and 10796); 9318-(10794, 10795, 10797) were tested both in vitro (In primary monkey hepatocytes) or in vivo (9314 and 10792) formulated in LNP-01. FIG. 7 (also see Tables 1 and 2) shows that the parent molecules 9314 and 9318 and the modified versions are all active in vitro. FIG. 8 as an example shows that both the parent 9314 and the more highly modified 10792 sequences are active in vivo displaying 50-60% silencing of endogenous PCSK9 in mice. FIG. 9 furthur exemplifies that activity of other chemically modified versions of the parents 9314 and 10792.

### dsRNA Expression Vectors

[0167] In another aspect of the invention, PCSK9 specific dsRNA molecules that modulate PCSK9 gene expression activity are expressed from transcription units inserted into DNA or RNA vectors (see, e.g., Couture, A, et al., TIG. (1996), 12:5-10; Skillern, A., et al., International PCT Publication No. WO 00/22113, Conrad, International PCT Publication No. WO 00/22114, and Conrad, U.S. Pat. No. 6,054,299). These transgenes can be introduced as a linear construct, a circular plasmid, or a viral vector, which can be incorporated and inherited as a transgene integrated into the host genome. The transgene can also be constructed to permit it to be inherited as an extrachromosomal plasmid (Gassmann, et al., Proc. Natl. Acad. Sci. USA (1995) 92:1292).

[0168] The individual strands of a dsRNA can be transcribed by promoters on two separate expression vectors and co-transfected into a target cell. Alternatively each individual strand of the dsRNA can be transcribed by promoters both of which are located on the same expression plasmid. In a preferred embodiment, a dsRNA is expressed as an inverted repeat joined by a linker polynucleotide sequence such that the dsRNA has a stem and loop structure.

[0169] The recombinant dsRNA expression vectors are generally DNA plasmids or viral vectors. dsRNA expressing viral vectors can be constructed based on, but not limited to, adeno-associated virus (for a review, see Muzyczka, et al., Curr. Topics Micro. Immunol. (1992) 158:97-129)); adenovirus (see, for example, Berkner, et al., BioTechniques (1998) 6:616), Rosenfeld et al. (1991, Science 252:431-434), and Rosenfeld et al. (1992), Cell 68:143-155)); or alphavirus as well as others known in the art. Retroviruses have been used to introduce a variety of genes into many different cell types, including epithelial cells, in vitro and/or in vivo (see, e.g., Eglitis, et al., Science (1985) 230:1395-1398; Danos and Mulligan, Proc. Natl. Acad. Sci. USA (1998) 85:6460-6464; Wilson et al., 1988, Proc. NatI. Acad. Sci. USA 85:3014-3018; Armentano et al., 1990, Proc. NatI. Acad. Sci. USA 87:61416145; Huber et al., 1991, Proc. NatI. Acad. Sci. USA 88:8039-8043; Ferry et al., 1991, Proc. NatI. Acad. Sci. USA 88:8377-8381; Chowdhury et al., 1991, Science 254:1802-1805; van Beusechem. et al., 1992, Proc. Nad. Acad. Sci. USA 89:7640-19; Kay et al., 1992, Human Gene Therapy 3:641-647; Dai et al., 1992, Proc. Natl. Acad. Sci. USA 89:10892-10895; Hwu et al., 1993, J. Immunol. 150:4104-4115; U.S. Pat. Nos. 4,868,116; 4,980,286; PCT Application WO 89/07136; PCT Application WO 89/02468; PCT Application WO 89/05345; and PCT Application WO 92/07573). Recombinant retroviral vectors capable of transducing and expressing genes inserted into the genome of a cell can be produced by transfecting the recombinant retroviral genome into suitable packaging cell lines such as PA317 and Psi-CRIP (Comette et al., 1991, Human Gene Therapy 2:5-10; Cone et al., 1984, Proc. Natl. Acad. Sci. USA 81:6349). Recombinant adenoviral vectors can be used to infect a wide variety of cells and tissues in susceptible hosts (e.g., rat, hamster, dog, and chimpanzee) (Hsu et al., 1992, J. Infectious Disease, 166:769), and also have the advantage of not requiring mitotically active cells for infection.

[0170] The promoter driving dsRNA expression in either a DNA plasmid or viral vector of the invention may be a eukaryotic RNA polymerase I (e.g. ribosomal RNA promoter), RNA polymerase II (e.g. CMV early promoter or actin promoter or U1 snRNA promoter) or generally RNA polymerase III promoter (e.g. U6 snRNA or 7SK RNA promoter) or a prokaryotic promoter, for example the T7 promoter, provided the expression plasmid also encodes T7 RNA polymerase required for transcription from a T7 promoter. The promoter can also direct transgene expression to the pancreas (see, e.g. the insulin regulatory sequence for pancreas (Bucchini et al., 1986, Proc. Natl. Acad. Sci. USA 83:2511-2515)).

[0171] In addition, expression of the transgene can be precisely regulated, for example, by using an inducible regulatory sequence and expression systems such as a regulatory sequence that is sensitive to certain physiological regulators, e.g., circulating glucose levels, or hormones (Docherty et al., 1994, FASEB J. 8:20-24). Such inducible expression systems, suitable for the control of transgene expression in cells or in mammals include regulation by ecdysone, by estrogen, progesterone, tetracycline, chemical inducers of dimerization, and isopropyl-beta-D1-thiogalactopyranoside (EPTG). A person skilled in the art would be able to choose the appropriate regulatory/promoter sequence based on the intended use of the dsRNA transgene.

[0172] Generally, recombinant vectors capable of expressing dsRNA molecules are delivered as described below, and persist in target cells. Alternatively, viral vectors can be used that provide for transient expression of dsRNA molecules. Such vectors can be repeatedly administered as necessary. Once expressed, the dsRNAs bind to target RNA and modulate its function or expression. Delivery of dsRNA expressing vectors can be systemic, such as by intravenous or intramuscular administration, by administration to target cells ex-planted from the patient followed by reintroduction into the patient, or by any other means that allows for introduction into a desired target cell.

[0173] dsRNA expression DNA plasmids are typically transfected into target cells as a complex with cationic lipid carriers (e.g. Oligofectamine) or non-cationic lipid-based carriers (e.g. Transit-TKO™). Multiple lipid transfections for dsRNA-mediated knockdowns targeting different regions of a single PCSK9 gene or multiple PCSK9 genes over a period of a week or more are also contemplated by the invention. Successful introduction of the vectors of the invention into host cells can be monitored using various known methods. For example, transient transfection. can be signaled with a reporter, such as a fluorescent marker, such as Green Fluorescent Protein (GFP). Stable transfection. of ex vivo cells can be ensured using markers that provide the transfected cell with resistance to specific environmental factors (e.g., antibiotics and drugs), such as hygromycin B resistance.

[0174] The PCSK9 specific dsRNA molecules can also be inserted into vectors and used as gene therapy vectors for human patients. Gene therapy vectors can be delivered to a subject by, for example, intravenous injection, local administration (see U.S. Pat. No. 5,328,470) or by stereotactic injection (see e.g., Chen et al. (1994) Proc. Natl. Acad. Sci. USA 91:3054-3057). The pharmaceutical preparation of the gene therapy vector can include the gene therapy vector in an acceptable diluent, or can comprise a slow release matrix in which the gene delivery vehicle is imbedded. Alternatively, where the complete gene delivery vector can be produced intact from recombinant cells, e.g., retroviral vectors, the pharmaceutical preparation can include one or more cells which produce the gene delivery system.

[0175] Those skilled in the art are familiar with methods and compositions in addition to those specifically set out in the instant disclosure which will allow them to practice this invention to the full scope of the claims hereinafter appended.

TABLE 1
sequences

| position | | | | | |
|---|---|---|---|---|---|
| in human | | SEQ | | SEQ | |
| access. # | | ID | | ID | Duplex |
| NM_174936 | Sense strand sequence (5′-3′)¹ | NO: | Antisense-strand sequence (5′-3′)¹ | NO: | name |
| 2-20 | AGCGACGUCGAGGCGCUCATT | 1 | UGAGCGCCUCGACGUCGCUTT | 2 | AD-15220 |
| 15-33 | CGCUCAUGGUUGCAGGCGGTT | 3 | CCGCCUGCAACCAUGAGCGTT | 4 | AD-15275 |
| 16-34 | GCUCAUGGUUGCAGGCGGGTT | 5 | CCCGCCUGCAACCAUGAGCTT | 6 | AD-15301 |
| 30-48 | GCGGGCGCCGCCGUUCAGUTT | 7 | ACUGAACGGCGGCGCCCGCTT | 8 | AD-15276 |
| 31-49 | CGGGCGCCGCCGUUCAGUUTT | 9 | AACUGAACGGCGGCGCCCGTT | 10 | AD-15302 |
| 32-50 | GGGCGCCGCCGUUCAGUUCTT | 11 | GAACUGAACGGCGGCGCCCTT | 12 | AD-15303 |
| 40-58 | CCGUUCAGUUCAGGGUCUGTT | 13 | CAGACCCUGAACUGAACGGTT | 14 | AD-15221 |
| 43-61 | UUCAGUUCAGGGUCUGAGCTT | 15 | GCUCAGACCCUGAACUGAATT | 16 | AD-15413 |
| 82-100 | GUGAGACUGGCUCGGGCGGTT | 17 | CCGCCCGAGCCAGUCUCACTT | 18 | AD-15304 |
| 100-118 | GGCCGGGACGCGUCGUUGCTT | 19 | GCAACGACGCGUCCCGGCCTT | 20 | AD-15305 |
| 101-119 | GCCGGGACGCGUCGUUGCATT | 21 | UGCAACGACGCGUCCCGGCTT | 22 | AD-15306 |
| 102-120 | CCGGGACGCGUCGUUGCAGTT | 23 | CUGCAACGACGCGUCCCGGTT | 24 | AD-15307 |
| 105-123 | GGACGCGUCGUUGCAGCAGTT | 25 | CUGCUGCAACGACGCGUCCTT | 26 | AD-15277 |
| 135-153 | UCCCAGCCAGGAUUCCGCGTsT | 27 | CGCGGAAUCCUGGCUGGGATsT | 28 | AD-9526 |
| 135-153 | ucccAGccAGGAuuccGcGTsT | 29 | CGCGGAAUCCUGGCUGGGATsT | 30 | AD-9652 |
| 136-154 | CCCAGCCAGGAUUCCGCGCTsT | 31 | GCGCGGAAUCCUGGCUGGGTsT | 32 | AD-9519 |
| 136-154 | cccAGccAGGAuuccGcGcTsT | 33 | GCGCGGAAUCCUGGCUGGGTsT | 34 | AD-9645 |
| 138-156 | CAGCCAGGAUUCCGCGCGCTsT | 35 | GCGCGCGGAAUCCUGGCUGTsT | 36 | AD-9523 |
| 138-156 | cAGccAGGAuuccGcGcGcTsT | 37 | GCGCGCGGAAUCCUGGCUGTsT | 38 | AD-9649 |
| 185-203 | AGCUCCUGCACAGUCCUCCTsT | 39 | GGAGGACUGUGCAGGAGCUTsT | 40 | AD-9569 |
| 185-203 | AGcuccuGcAcAGuccuccTsT | 41 | GGAGGACUGUGcAGGAGCUTsT | 42 | AD-9695 |
| 205-223 | CACCGCAAGGCUCAAGGCGTT | 43 | CGCCUUGAGCCUUGCGGUGTT | 44 | AD-15222 |
| 208-226 | CGCAAGGCUCAAGGCGCCGTT | 45 | CGGCGCCUUGAGCCUUGCGTT | 46 | AD-15278 |
| 210-228 | CAAGGCUCAAGGCGCCGCCTT | 47 | GGCGGCGCCUUGAGCCUUGTT | 48 | AD-15178 |
| 232-250 | GUGGACCGCGCACGGCCUCTT | 49 | GAGGCCGUGCGCGGUCCACTT | 50 | AD-15308 |
| 233-251 | UGGACCGCGCACGGCCUCUTT | 51 | AGAGGCCGUGCGCGGUCCATT | 52 | AD-15223 |
| 234-252 | GGACCGCGCACGGCCUCUATT | 53 | UAGAGGCCGUGCGCGGUCCTT | 54 | AD-15309 |
| 235-253 | GACCGCGCACGGCCUCUAGTT | 55 | CUAGAGGCCGUGCGCGGUCTT | 56 | AD-15279 |
| 236-254 | ACCGCGCACGGCCUCUAGGTT | 57 | CCUAGAGGCCGUGCGCGGUTT | 58 | AD-15194 |
| 237-255 | CCGCGCACGGCCUCUAGGUTT | 59 | ACCUAGAGGCCGUGCGCGGTT | 60 | AD-15310 |
| 238-256 | CGCGCACGGCCUCUAGGUCTT | 61 | GACCUAGAGGCCGUGCGCGTT | 62 | AD-15311 |
| 239-257 | GCGCACGGCCUCUAGGUCUTT | 63 | AGACCUAGAGGCCGUGCGCTT | 64 | AD-15392 |
| 240-258 | CGCACGGCCUCUAGGUCUCTT | 65 | GAGACCUAGAGGCCGUGCGTT | 66 | AD-15312 |
| 248-266 | CUCUAGGUCUCCUCGCCAGTT | 67 | CUGGCGAGGAGACCUAGAGTT | 68 | AD-15313 |
| 249-267 | UCUAGGUCUCCUCGCCAGGTT | 69 | CCUGGCGAGGAGACCUAGATT | 70 | AD-15280 |
| 250-268 | CUAGGUCUCCUCGCCAGGATT | 71 | UCCUGGCGAGGAGACCUAGTT | 72 | AD-15267 |
| 252-270 | AGGUCUCCUCGCCAGGACATT | 73 | UGUCCUGGCGAGGAGACCUTT | 74 | AD-15314 |
| 258-276 | CCUCGCCAGGACAGCAACCTT | 75 | GGUUGCUGUCCUGGCGAGGTT | 76 | AD-15315 |
| 300-318 | CGUCAGCUCCAGGCGGUCCTsT | 77 | GGACCGCCUGGAGCUGACGTsT | 78 | AD-9624 |
| 300-318 | cGucAGcuccAGGcGGuccTsT | 79 | GGACCGCCUGGAGCUGACGTsT | 80 | AD-9750 |
| 301-319 | GUCAGCUCCAGGCGGUCCUTsT | 81 | AGGACCGCCUGGAGCUGACTsT | 82 | AD-9623 |
| 301-319 | GucAGcuccAGGcGGuccuTsT | 83 | AGGACCGCCUGGAGCUGACTsT | 84 | AD-9749 |
| 370-388 | GGCGCCCGUGCGCAGGAGGTT | 85 | CCUCCUGCGCACGGGCGCCTT | 86 | AD-15384 |
| 408-426 | GGAGCUGGUGCUAGCCUUGTsT | 87 | CAAGGCUAGCACCAGCUCCTsT | 88 | AD-9607 |
| 408-426 | GGAGcuGGuGcuAGccuuGTsT | 89 | cAAGGCuAGcACcAGCUCCTsT | 90 | AD-9733 |
| 411-429 | GCUGGUGCUAGCCUUGCGUTsT | 91 | ACGCAAGGCUAGCACCAGCTsT | 92 | AD-9524 |
| 411-429 | GcuGGuGcuAGccuuGcGuTsT | 93 | ACGcAAGGCuAGcACcAGCTsT | 94 | AD-9650 |
| 412-430 | CUGGUGCUAGCCUUGCGUUTsT | 95 | AACGCAAGGCUAGCACCAGTsT | 96 | AD-9520 |
| 412-430 | CUGGUGCUAGCCUUGCGUUTsT | 97 | AACGCAAGGCUAGCACCAGTsT | 98 | AD-9520 |
| 412-430 | cuGGuGcuAGccuuGcGuuTsT | 99 | AACGcAAGGCuAGcACcAGTsT | 100 | AD-9646 |
| 416-434 | UGCUAGCCUUGCGUUCCGATsT | 101 | UCGGAACGCAAGGCUAGCATsT | 102 | AD-9608 |
| 416-434 | uGcuAGccuuGcGuuccGATsT | 103 | UCGGAACGcAAGGCuAGcATsT | 104 | AD-9734 |
| 419-437 | UAGCCUUGCGUUCCGAGGATsT | 105 | UCCUCGGAACGCAAGGCUATsT | 106 | AD-9546 |
| 419-437 | uAGccuuGcGuuccGAGGATsT | 107 | UCCUCGGAACGcAAGGCuATsT | 108 | AD-9672 |
| 439-457 | GACGGCCUGGCCGAAGCACTT | 109 | GUGCUUCGGCCAGGCCGUCTT | 110 | AD-15385 |
| 447-465 | GGCCGAAGCACCCGAGCACTT | 111 | GUGCUCGGGUGCUUCGGCCTT | 112 | AD-15393 |
| 448-466 | GCCGAAGCACCCGAGCACGTT | 113 | CGUGCUCGGGUGCUUCGGCTT | 114 | AD-15316 |
| 449-467 | CCGAAGCACCCGAGCACGGTT | 115 | CCGUGCUCGGGUGCUUCGGTT | 116 | AD-15317 |
| 458-476 | CCGAGCACGGAACCACAGCTT | 117 | GCUGUGGUUCCGUGCUCGGTT | 118 | AD-15318 |
| 484-502 | CACCGCUGCGCCAAGGAUCTT | 119 | GAUCCUUGGCGCAGCGGUGTT | 120 | AD-15195 |
| 486-504 | CCGCUGCGCCAAGGAUCCGTT | 121 | CGGAUCCUUGGCGCAGCGGTT | 122 | AD-15224 |
| 487-505 | CGCUGCGCCAAGGAUCCGUTT | 123 | ACGGAUCCUUGGCGCAGCGTT | 124 | AD-15188 |
| 489-507 | CUGCGCCAAGGAUCCGUGGTT | 125 | CCACGGAUCCUUGGCGCAGTT | 126 | AD-15225 |
| 500-518 | AUCCGUGGAGGUUGCCUGGTT | 127 | CCAGGCAACCUCCACGGAUTT | 128 | AD-15281 |
| 509-527 | GGUUGCCUGGCACCUACGUTT | 129 | ACGUAGGUGCCAGGCAACCTT | 130 | AD-15282 |
| 542-560 | AGGAGACCCACCUCUCGCATT | 131 | UGCGAGAGGUGGGUCUCCUTT | 132 | AD-15319 |
| 543-561 | GGAGACCCACCUCUCGCAGTT | 133 | CUGCGAGAGGUGGGUCUCCTT | 134 | AD-15226 |
| 544-562 | GAGACCCACCUCUCGCAGUTT | 135 | ACUGCGAGAGGUGGGUCUCTT | 136 | AD-15271 |
| 549-567 | CCACCUCUCGCAGUCAGAGTT | 137 | CUCUGACUGCGAGAGGUGGTT | 138 | AD-15283 |
| 552-570 | CCUCUCGCAGUCAGAGCGCTT | 139 | GCGCUCUGACUGCGAGAGGTT | 140 | AD-15284 |
| 553-571 | CUCUCGCAGUCAGAGCGCATT | 141 | UGCGCUCUGACUGCGAGAGTT | 142 | AD-15189 |
| 554-572 | UCUCGCAGUCAGAGCGCACTT | 143 | GUGCGCUCUGACUGCGAGATT | 144 | AD-15227 |
| 555-573 | CUCGCAGUCAGAGCGCACUTsT | 145 | AGUGCGCUCUGACUGCGAGTsT | 146 | AD-9547 |
| 555-573 | cucGcAGucAGAGcGcAcuTsT | 147 | AGUGCGCUCUGACUGCGAGTsT | 148 | AD-9673 |
| 558-576 | GCAGUCAGAGCGCACUGCCTsT | 149 | GGCAGUGCGCUCUGACUGCTsT | 150 | AD-9548 |
| 558-576 | GcAGucAGAGcGcAcuGccTsT | 151 | GGcAGUGCGCUCUGACUGCTsT | 152 | AD-9674 |
| 606-624 | GGGAUACCUCACCAAGAUCTsT | 153 | GAUCUUGGUGAGGUAUCCCTsT | 154 | AD-9529 |
| 606-624 | GGGAuAccucAccAAGAucTsT | 155 | GAUCUUGGUGAGGuAUCCCTsT | 156 | AD-9655 |
| 659-677 | UGGUGAAGAUGAGUGGCGATsT | 157 | UCGCCACUCAUCUUCACCATsT | 158 | AD-9605 |
| 659-677 | uGGuGAAGAuGAGuGGcGATsT | 159 | UCGCcACUcAUCUUcACcATsT | 160 | AD-9731 |
| 663-681 | GAAGAUGAGUGGCGACCUGTsT | 161 | CAGGUCGCCACUCAUCUUCTsT | 162 | AD-9596 |
| 663-681 | GAAGAuGAGuGGcGAccuGTsT | 163 | cAGGUCGCcACUcAUCUUCTsT | 164 | AD-9722 |
| 704-722 | CCCAUGUCGACUACAUCGATsT | 165 | UCGAUGUAGUCGACAUGGGTsT | 166 | AD-9583 |
| 704-722 | cccAuGucGAcuAcAucGATsT | 167 | UCGAUGuAGUCGAcAUGGGTsT | 168 | AD-9709 |
| 718-736 | AUCGAGGAGGACUCCUCUGTsT | 169 | CAGAGGAGUCCUCCUCGAUTsT | 170 | AD-9579 |
| 718-736 | AucGAGGAGGAcuccucuGTsT | 171 | cAGAGGAGUCCUCCUCGAUTsT | 172 | AD-9705 |
| 758-776 | GGAACCUGGAGCGGAUUACTT | 173 | GUAAUCCGCUCCAGGUUCCTT | 174 | AD-15394 |
| 759-777 | GAACCUGGAGCGGAUUACCTT | 175 | GGUAAUCCGCUCCAGGUUCTT | 176 | AD-15196 |
| 760-778 | AACCUGGAGCGGAUUACCCTT | 177 | GGGUAAUCCGCUCCAGGUUTT | 178 | AD-15197 |
| 777-795 | CCCUCCACGGUACCGGGCGTT | 179 | CGCCCGGUACCGUGGAGGGTT | 180 | AD-15198 |
| 782-800 | CACGGUACCGGGCGGAUGATsT | 181 | UCAUCCGCCCGGUACCGUGTsT | 182 | AD-9609 |
| 782-800 | cAcGGuAccGGGcGGAuGATsT | 183 | UcAUCCGCCCGGuACCGUGTsT | 184 | AD-9735 |
| 783-801 | ACGGUACCGGGCGGAUGAATsT | 185 | UUCAUCCGCCCGGUACCGUTsT | 186 | AD-9537 |
| 783-801 | AcGGuAccGGGcGGAuGAATsT | 187 | UUcAUCCGCCCGGuACCGUTsT | 188 | AD-9663 |
| 784-802 | CGGUACCGGGCGGAUGAAUTsT | 189 | AUUCAUCCGCCCGGUACCGTsT | 190 | AD-9528 |
| 784-802 | cGGuAccGGGcGGAuGAAuTsT | 191 | AUUcAUCCGCCCGGuACCGTsT | 192 | AD-9654 |
| 785-803 | GGUACCGGGCGGAUGAAUATsT | 193 | UAUUCAUCCGCCCGGUACCTsT | 194 | AD-9515 |
| 785-803 | GGuAccGGGcGGAuGAAuATsT | 195 | uAUUcAUCCGCCCGGuACCTsT | 196 | AD-9641 |
| 786-804 | GUACCGGGCGGAUGAAUACTsT | 197 | GUAUUCAUCCGCCCGGUACTsT | 198 | AD-9514 |
| 786-804 | GuAccGGGcGGAuGAAuAcTsT | 199 | GuAUUcAUCCGCCCGGuACTsT | 200 | AD-9640 |
| 788-806 | ACCGGGCGGAUGAAUACCATsT | 201 | UGGUAUUCAUCCGCCCGGUTsT | 202 | AD-9530 |
| 788-806 | AccGGGcGGAuGAAuAccATsT | 203 | UGGuAUUcAUCCGCCCGGUTsT | 204 | AD-9656 |
| 789-807 | CCGGGCGGAUGAAUACCAGTsT | 205 | CUGGUAUUCAUCCGCCCGGTsT | 206 | AD-9538 |
| 789-807 | ccGGGcGGAuGAAuAccAGTsT | 207 | CUGGuAUUcAUCCGCCCGGTsT | 208 | AD-9664 |
| 825-843 | CCUGGUGGAGGUGUAUCUCTsT | 209 | GAGAUACACCUCCACCAGGTsT | 210 | AD-9598 |
| 825-843 | ccuGGuGGAGGuGuAucucTsT | 211 | GAGAuAcACCUCcACcAGGTsT | 212 | AD-9724 |
| 826-844 | CUGGUGGAGGUGUAUCUCCTsT | 213 | GGAGAUACACCUCCACCAGTsT | 214 | AD-9625 |
| 826-844 | cuGGuGGAGGuGuAucuccTsT | 215 | GGAGAuAcACCUCcACcAGTsT | 216 | AD-9751 |
| 827-845 | UGGUGGAGGUGUAUCUCCUTsT | 217 | AGGAGAUACACCUCCACCATsT | 218 | AD-9556 |
| 827-845 | uGGuGGAGGuGuAucuccuTsT | 219 | AGGAGAuAcACCUCcACcATsT | 220 | AD-9682 |
| 828-846 | GGUGGAGGUGUAUCUCCUATsT | 221 | UAGGAGAUACACCUCCACCTsT | 222 | AD-9539 |
| 828-846 | GGuGGAGGuGuAucuccuATsT | 223 | uAGGAGAuAcACCUCcACCTsT | 224 | AD-9665 |
| 831-849 | GGAGGUGUAUCUCCUAGACTsT | 225 | GUCUAGGAGAUACACCUCCTsT | 226 | AD-9517 |
| 831-849 | GGAGGuGuAucuccuAGAcTsT | 227 | GUCuAGGAGAuAcACCUCCTsT | 228 | AD-9643 |
| 833-851 | AGGUGUAUCUCCUAGACACTsT | 229 | GUGUCUAGGAGAUACACCUTsT | 230 | AD-9610 |
| 833-851 | AGGuGuAucuccuAGAcAcTsT | 231 | GUGUCuAGGAGAuAcACCUTsT | 232 | AD-9736 |
| 833-851 | AfgGfuGfuAfuCfuCfcUfaGfaCfaCfTsT | 233 | p-gUfgUfcUfaGfgAfgAfuAfcAfcCfuTsT | 234 | AD-14681 |
| 833-851 | AGGUfGUfAUfCfUfCfCfUfAGACfACfTsT | 235 | GUfGUfCfUfAGGAGAUfACfACfCfUfTsT | 236 | AD-14691 |
| 833-851 | AgGuGuAuCuCcUaGaCaCTsT | 237 | p-gUfgUfcUfaGfgAfgAfuAfcAfcCfuTsT | 238 | AD-14701 |
| 833-851 | AgGuGuAuCuCcUaGaCaCTsT | 239 | GUfGUfCfUfAGGAGAUfACfACfCfUfTsT | 240 | AD-14711 |
| 833-851 | AfgGfuGfuAfuCfuCfcUfaGfaCfaCfTsT | 241 | GUGUCuaGGagAUACAccuTsT | 242 | AD-14721 |
| 833-851 | AGGUfGUfAUfCfUfCfCfUfAGACfACfTsT | 243 | GUGUCuaGGagAUACAccuTsT | 244 | AD-14731 |
| 833-851 | AgGuGuAuCuCcUaGaCaCTsT | 245 | GUGUCuaGGagAUACAccuTsT | 246 | AD-14741 |
| 833-851 | GfcAfcCfcUfcAfuAfgGfcCfuGfgAffsT | 247 | p-uCfcAfgGfcCfuAfuGfaGfgGfuGfcTsT | 248 | AD-15087 |
| 833-851 | GCfACfCfCfUfCfAUfAGGCfCfUfGGATsT | 249 | UfCfCfAGGCfCfUfAUfGAGGGUfGCfTsT | 250 | AD-15097 |
| 833-851 | GcAcCcUcAuAgGcCuGgATsT | 251 | p-uCfcAfgGfcCfuAfuGfaGfgGfuGfcTsT | 252 | AD-15107 |
| 833-851 | GcAcCcUcAuAgGcCuGgATsT | 253 | UfCfCfAGGCfCfUfAUfGAGGGUfGCfTsT | 254 | AD-15117 |
| 833-851 | GfcAfcCfcUfcAfuAfgGfcCfuGfgAffsT | 255 | UCCAGgcCUauGAGGGugcTsT | 256 | AD-15127 |
| 833-851 | GCfACfCfCfUfCfAUfAGGCfCfUfGGATsT | 257 | UCCAGgcCUauGAGGGugcTsT | 258 | AD-15137 |
| 833-851 | GcAcCcUcAuAgGcCuGgATsT | 259 | UCCAGgcCUauGAGGGugcTsT | 260 | AD-15147 |
| 836-854 | UGUAUCUCCUAGACACCAGTsT | 261 | CUGGUGUCUAGGAGAUACATsT | 262 | AD-9516 |
| 836-854 | uGuAucuccuAGAcAccAGTsT | 263 | CUGGUGUCuAGGAGAuAcATsT | 264 | AD-9642 |
| 840-858 | UCUCCUAGACACCAGCAUATsT | 265 | UAUGCUGGUGUCUAGGAGATsT | 266 | AD-9562 |
| 840-858 | ucuccuAGAcAccAGcAuATsT | 267 | uAUGCUGGUGUCuAGGAGATsT | 268 | AD-9688 |
| 840-858 | UfcUfcCfuAfgAfcAfcCfaGfcAfuAfTsT | 269 | p-uAfuGfcUfgGfuGfuCfuAfgGfaGfaTsT | 270 | AD-14677 |
| 840-858 | UfCfUfCfCfUfAGACfACfCfAGCfAUfATsT | 271 | UfAUfGCfUfGGUfGUfCfUfAGGAGATsT | 272 | AD-14687 |
| 840-858 | UcUcCuAgAcAcCaGcAuATsT | 273 | p-uAfuGfcUfgGfuGfuCfuAfgGfaGfaTsT | 274 | AD-14697 |
| 840-858 | UcUcCuAgAcAcCaGcAuATsT | 275 | UfAUfGCfUfGGUfGUfCfUfAGGAGATsT | 276 | AD-14707 |
| 840-858 | UfatfcCMAafAfcAfcCfaGfcAfuAffsT | 277 | UAUGCugGUguCUAGGagaTsT | 278 | AD-14717 |
| 840-858 | UfCfUfCfCfUfAGACfACfCfAGCfAUfATsT | 279 | UAUGCugGUguCUAGGagaTsT | 280 | AD-14727 |
| 840-858 | UcUcCuAgAcAcCaGcAuATsT | 281 | UAUGCugGUguCUAGGagaTsT | 282 | AD-14737 |
| 840-858 | AfgGfcCfuGfgAfgUfuUfaUfuCfgGfTsT | 283 | p-cCfgAfaUfaAfaCfuCfcAfgGfcCfuTsT | 284 | AD-15083 |
| 840-858 | AGGCfCfUfGGAGUfUfUfAUfUfCfGGTsT | 285 | CfCfGAAUfAAACfUfCfCfAGGCfCfUfTsT | 286 | AD-15093 |
| 840-858 | AgGcCuGgAgUuUaUuCgGTsT | 287 | p-cCfgAfaUfaAfaCfuCfcAfgGfcCfuTsT | 288 | AD-15103 |
| 840-858 | AgGcCuGgAgUuUaUuCgGTsT | 289 | CfCfGAAUfAAACfUfCfCfAGGCfCfUfTsT | 290 | AD-15113 |
| 840-858 | AfgGfcCfuGfgAfgUfuUfaUfuCfgGfTsT | 291 | CCGAAuaAAcuCCAGGccuTsT | 292 | AD-15123 |
| 840-858 | AGGCfCfUfGGAGUfUfUfAUfUfCfGGTsT | 293 | CCGAAuaAAcuCCAGGccuTsT | 294 | AD-15133 |
| 840-858 | AgGcCuGgAgUuUaUuCgGTsT | 295 | CCGAAuaAAcuCCAGGccuTsT | 296 | AD-15143 |
| 841-859 | CUCCUAGACACCAGCAUACTsT | 297 | GUAUGCUGGUGUCUAGGAGTsT | 298 | AD-9521 |
| 841-859 | cuccuAGAcAccAGcAuAcTsT | 299 | GuAUGCUGGUGUCuAGGAGTsT | 300 | AD-9647 |
| 842-860 | UCCUAGACACCAGCAUACATsT | 301 | UGUAUGCUGGUGUCUAGGATsT | 302 | AD-9611 |
| 842-860 | uccuAGAcAccAGcAuAcATsT | 303 | UGuAUGCUGGUGUCuAGGATsT | 304 | AD-9737 |
| 843-861 | CCUAGACACCAGCAUACAGTsT | 305 | CUGUAUGCUGGUGUCUAGGTsT | 306 | AD-9592 |
| 843-861 | ccuAGAcAccAGcAuAcAGTsT | 307 | CUGuAUGCUGGUGUCuAGGTsT | 308 | AD-9718 |
| 847-865 | GACACCAGCAUACAGAGUGTsT | 309 | CACUCUGUAUGCUGGUGUCTsT | 310 | AD-9561 |
| 847-865 | GAcAccAGcAuAcAGAGuGTsT | 311 | cACUCUGuAUGCUGGUGUCTsT | 312 | AD-9687 |
| 855-873 | CAUACAGAGUGACCACCGGTsT | 313 | CCGGUGGUCACUCUGUAUGTsT | 314 | AD-9636 |
| 855-873 | cAuAcAGAGuGAccAccGGTsT | 315 | CCGGUGGUcACUCUGuAUGTsT | 316 | AD-9762 |
| 860-878 | AGAGUGACCACCGGGAAAUTsT | 317 | AUUUCCCGGUGGUCACUCUTsT | 318 | AD-9540 |
| 860-878 | AGAGuGAccAccGGGAAAuTsT | 319 | AUUUCCCGGUGGUcACUCUTsT | 320 | AD-9666 |
| 861-879 | GAGUGACCACCGGGAAAUCTsT | 321 | GAUUUCCCGGUGGUCACUCTsT | 322 | AD-9535 |
| 861-879 | GAGuGAccAccGGGAAAucTsT | 323 | GAUUUCCCGGUGGUcACUCTsT | 324 | AD-9661 |
| 863-881 | GUGACCACCGGGAAAUCGATsT | 325 | UCGAUUUCCCGGUGGUCACTsT | 326 | AD-9559 |
| 863-881 | GuGAccAccGGGAAAucGATsT | 327 | UCGAUUUCCCGGUGGUcACTsT | 328 | AD-9685 |
| 865-883 | GACCACCGGGAAAUCGAGGTsT | 329 | CCUCGAUUUCCCGGUGGUCTsT | 330 | AD-9533 |
| 865-883 | GAccAccGGGAAAucGAGGTsT | 331 | CCUCGAUUUCCCGGUGGUCTsT | 332 | AD-9659 |
| 866-884 | ACCACCGGGAAAUCGAGGGTsT | 333 | CCCUCGAUUUCCCGGUGGUTsT | 334 | AD-9612 |
| 866-884 | AccAccGGGAAAucGAGGGTsT | 335 | CCCUCGAUUUCCCGGUGGUTsT | 336 | AD-9738 |
| 867-885 | CCACCGGGAAAUCGAGGGCTsT | 337 | GCCCUCGAUUUCCCGGUGGTsT | 338 | AD-9557 |
| 867-885 | ccAccGGGAAAucGAGGGcTsT | 339 | GCCCUCGAUUUCCCGGUGGTsT | 340 | AD-9683 |
| 875-893 | AAAUCGAGGGCAGGGUCAUTsT | 341 | AUGACCCUGCCCUCGAUUUTsT | 342 | AD-9531 |
| 875-893 | AAAucGAGGGcAGGGucAuTsT | 343 | AUGACCCUGCCCUCGAUUUTsT | 344 | AD-9657 |
| 875-893 | AfaAfuCfgAfgGfgCfaGfgGfuCfaUfTsT | 345 | p-aUfgAfcCfcUfgCfcCfuCfgAfuUfuTsT | 346 | AD-14673 |
| 875-893 | AAAUfCfGAGGGCfAGGGUfCfAUfTsT | 347 | AUfGACfCfCfUfGCfCfCfUfCfGAUfUfUfTsT | 348 | AD-14683 |
| 875-893 | AaAuCgAgGgCaGgGuCaUTsT | 349 | p-aUfgAfcCfcUfgCfcCfuCfgAfuUfuTsT | 350 | AD-14693 |
| 875-893 | AaAuCgAgGgCaGgGuCaUTsT | 351 | AUfGACfCfCfUfGCfCfCfUfCfGAUfUfUfTsT | 352 | AD-14703 |
| 875-893 | AfaAfuCfgAfgGfgCfaGfgGfuCfaUfTsT | 353 | AUGACccUGccCUCGAuuuTsT | 354 | AD-14713 |
| 875-893 | AAAUfCfGAGGGCfAGGGUfCfAUfTsT | 355 | AUGACccUGccCUCGAuuuTsT | 356 | AD-14723 |
| 875-893 | AaAuCgAgGgCaGgGuCaUTsT | 357 | AUGACccUGccCUCGAuuuTsT | 358 | AD-14733 |
| 875-893 | CfgGfcAfcCfcUfcAfuAfgGfcCfuGfTsT | 359 | p-cAfgGfcCfuAfuGfaGfgGfuGfcCfgTsT | 360 | AD-15079 |
| 875-893 | CfGGCfACfCfCfUfCfAUfAGGCfCfUfGTsT | 361 | CfAGGCfCfUfAUfGAGGGUfGCfCfGTsT | 362 | AD-15089 |
| 875-893 | CgGcAcCcUcAuAgGcCuGTsT | 363 | p-cAfgGfcCfuAfuGfaGfgGfuGfcCfgTsT | 364 | AD-15099 |
| 875-893 | CgGcAcCcUcAuAgGcCuGTsT | 365 | CfAGGCfCfUfAUfGAGGGUfGCfCfGTsT | 366 | AD-15109 |
| 875-893 | CfgGfcAfcCfcUfcAfuAfgGfcCfuGfTsT | 367 | CAGGCcuAUgaGGGUGccgTsT | 368 | AD-15119 |
| 875-893 | CfGGCfACfCfCfUfCfAUfAGGCfCfUfGTsT | 369 | CAGGCcuAUgaGGGUGccgTsT | 370 | AD-15129 |
| 875-893 | CgGcAcCcUcAuAgGcCuGTsT | 371 | CAGGCcuAUgaGGGUGccgTsT | 372 | AD-15139 |
| 877-895 | AUCGAGGGCAGGGUCAUGGTsT | 373 | CCAUGACCCUGCCCUCGAUTsT | 374 | AD-9542 |
| 877-895 | AucGAGGGcAGGGucAuGGTsT | 375 | CcAUGACCCUGCCCUCGAUTsT | 376 | AD-9668 |
| 878-896 | cGAGGGcAGGGucAuGGucTsT | 377 | GACcAUGACCCUGCCCUCGTsT | 378 | AD-9739 |
| 880-898 | GAGGGCAGGGUCAUGGUCATsT | 379 | UGACCAUGACCCUGCCCUCTsT | 380 | AD-9637 |
| 880-898 | GAGGGcAGGGucAuGGucATsT | 381 | UGACcAUGACCCUGCCCUCTsT | 382 | AD-9763 |
| 882-900 | GGGCAGGGUCAUGGUCACCTsT | 383 | GGUGACCAUGACCCUGCCCTsT | 384 | AD-9630 |
| 882-900 | GGGcAGGGucAuGGucAccTsT | 385 | GGUGACcAUGACCCUGCCCTsT | 386 | AD-9756 |
| 885-903 | CAGGGUCAUGGUCACCGACTsT | 387 | GUCGGUGACCAUGACCCUGTsT | 388 | AD-9593 |
| 885-903 | cAGGGucAuGGucAccGAcTsT | 389 | GUCGGUGACcAUGACCCUGTsT | 390 | AD-9719 |
| 886-904 | AGGGUCAUGGUCACCGACUTsT | 391 | AGUCGGUGACCAUGACCCUTsT | 392 | AD-9601 |
| 886-904 | AGGGucAuGGucAccGAcuTsT | 393 | AGUCGGUGACcAUGACCCUTsT | 394 | AD-9727 |
| 892-910 | AUGGUCACCGACUUCGAGATsT | 395 | UCUCGAAGUCGGUGACCAUTsT | 396 | AD-9573 |
| 892-910 | AuGGucAccGAcuucGAGATsT | 397 | UCUCGAAGUCGGUGACcAUTsT | 398 | AD-9699 |
| 899-917 | CCGACUUCGAGAAUGUGCCTT | 399 | GGCACAUUCUCGAAGUCGGTT | 400 | AD-15228 |
| 921-939 | GGAGGACGGGACCCGCUUCTT | 401 | GAAGCGGGUCCCGUCCUCCTT | 402 | AD-15395 |
| 993-1011 | CAGCGGCCGGGAUGCCGGCTsT | 403 | GCCGGCAUCCCGGCCGCUGTsT | 404 | AD-9602 |
| 993-1011 | cAGcGGccGGGAuGccGGcTsT | 405 | GCCGGcAUCCCGGCCGCUGTsT | 406 | AD-9728 |
| 1020-1038 | GGGUGCCAGCAUGCGCAGCTT | 407 | GCUGCGCAUGCUGGCACCCTT | 408 | AD-15386 |
| 1038-1056 | CCUGCGCGUGCUCAACUGCTsT | 409 | GCAGUUGAGCACGCGCAGGTsT | 410 | AD-9580 |
| 1038-1056 | ccuGcGcGuGcucAAcuGcTsT | 411 | GcAGUUGAGcACGCGcAGGTsT | 412 | AD-9706 |
| 1040-1058 | UGCGCGUGCUCAACUGCCATsT | 413 | UGGCAGUUGAGCACGCGCATsT | 414 | AD-9581 |
| 1040-1058 | uGcGcGuGcucAAcuGccATsT | 415 | UGGcAGUUGAGcACGCGcATsT | 416 | AD-9707 |
| 1042-1060 | CGCGUGCUCAACUGCCAAGTsT | 417 | CUUGGCAGUUGAGCACGCGTsT | 418 | AD-9543 |
| 1042-1060 | cGcGuGcucAAcuGccAAGTsT | 419 | CUUGGcAGUUGAGcACGCGTsT | 420 | AD-9669 |
| 1053-1071 | CUGCCAAGGGAAGGGCACGTsT | 421 | CGUGCCCUUCCCUUGGCAGTsT | 422 | AD-9574 |
| 1053-1071 | cuGccAAGGGAAGGGcAcGTsT | 423 | CGUGCCCUUCCCUUGGcAGTsT | 424 | AD-9700 |
| 1057-1075 | CAAGGGAAGGGCACGGUUATT | 425 | UAACCGUGCCCUUCCCUUGTT | 426 | AD-15320 |
| 1058-1076 | AAGGGAAGGGCACGGUUAGTT | 427 | CUAACCGUGCCCUUCCCUUTT | 428 | AD-15321 |
| 1059-1077 | AGGGAAGGGCACGGUUAGCTT | 429 | GCUAACCGUGCCCUUCCCUTT | 430 | AD-15199 |
| 1060-1078 | GGGAAGGGCACGGUUAGCGTT | 431 | CGCUAACCGUGCCCUUCCCTT | 432 | AD-15167 |
| 1061-1079 | GGAAGGGCACGGUUAGCGGTT | 433 | CCGCUAACCGUGCCCUUCCTT | 434 | AD-15164 |
| 1062-1080 | GAAGGGCACGGUUAGCGGCTT | 435 | GCCGCUAACCGUGCCCUUCTT | 436 | AD-15166 |
| 1063-1081 | AAGGGCACGGUUAGCGGCATT | 437 | UGCCGCUAACCGUGCCCUUTT | 438 | AD-15322 |
| 1064-1082 | AGGGCACGGUUAGCGGCACTT | 439 | GUGCCGCUAACCGUGCCCUTT | 440 | AD-15200 |
| 1068-1086 | CACGGUUAGCGGCACCCUCTT | 441 | GAGGGUGCCGCUAACCGUGTT | 442 | AD-15213 |
| 1069-1087 | ACGGUUAGCGGCACCCUCATT | 443 | UGAGGGUGCCGCUAACCGUTT | 444 | AD-15229 |
| 1072-1090 | GUUAGCGGCACCCUCAUAGTT | 445 | CUAUGAGGGUGCCGCUAACTT | 446 | AD-15215 |
| 1073-1091 | UUAGCGGCACCCUCAUAGGTT | 447 | CCUAUGAGGGUGCCGCUAATT | 448 | AD-15214 |
| 1076-1094 | GCGGCACCCUCAUAGGCCUTsT | 449 | AGGCCUAUGAGGGUGCCGCTsT | 450 | AD-9315 |
| 1079-1097 | GCACCCUCAUAGGCCUGGATsT | 451 | UCCAGGCCUAUGAGGGUGCTsT | 452 | AD-9326 |
| 1085-1103 | UCAUAGGCCUGGAGUUUAUTsT | 453 | AUAAACUCCAGGCCUAUGATsT | 454 | AD-9318 |
| 1090-1108 | GGCCUGGAGUUUAUUCGGATsT | 455 | UCCGAAUAAACUCCAGGCCTsT | 456 | AD-9323 |
| 1091-1109 | GCCUGGAGUUUAUUCGGAATsT | 457 | UUCCGAAUAAACUCCAGGCTsT | 458 | AD-9314 |
| 1091-1109 | GccuGGAGuuuAuucGGAATsT | 459 | UUCCGAAuAAACUCcAGGCTsT | 460 | AD-10792 |
| 1091-1109 | GccuGGAGuuuAuucGGAATsT | 461 | UUCCGAAUAACUCCAGGCTsT | 462 | AD-10796 |
| 1093-1111 | CUGGAGUUUAUUCGGAAAATsT | 463 | UUUUCCGAAUAAACUCCAGTsT | 464 | AD-9638 |
| 1093-1111 | cuGGAGuuuAuucGGAAAATsT | 465 | UUUUCCGAAuAAACUCcAGTsT | 466 | AD-9764 |
| 1095-1113 | GGAGUUUAUUCGGAAAAGCTsT | 467 | GCUUUUCCGAAUAAACUCCTsT | 468 | AD-9525 |
| 1095-1113 | GGAGuuuAuucGGAAAAGcTsT | 469 | GCUUUUCCGAAuAAACUCCTsT | 470 | AD-9651 |
| 1096-1114 | GAGUUUAUUCGGAAAAGCCTsT | 471 | GGCUUUUCCGAAUAAACUCTsT | 472 | AD-9560 |
| 1096-1114 | GAGuuuAuucGGAAAAGccTsT | 473 | GGCUUUUCCGAAuAAACUCTsT | 474 | AD-9686 |
| 1100-1118 | UUAUUCGGAAAAGCCAGCUTsT | 475 | AGCUGGCUUUUCCGAAUAATsT | 476 | AD-9536 |
| 1100-1118 | uuAuucGGAAAAGccAGcuTsT | 477 | AGCUGGCUUUUCCGAAuAATsT | 478 | AD-9662 |
| 1154-1172 | CCCUGGCGGGUGGGUACAGTsT | 479 | CUGUACCCACCCGCCAGGGTsT | 480 | AD-9584 |
| 1154-1172 | cccuGGcGGGuGGGuAcAGTsT | 481 | CUGuACCcACCCGCcAGGGTsT | 482 | AD-9710 |
| 1155-1173 | CCUGGCGGGUGGGUACAGCTT | 483 | GCUGUACCCACCCGCCAGGTT | 484 | AD-15323 |
| 1157-1175 | UGGCGGGUGGGUACAGCCGTsT | 485 | CGGCUGUACCCACCCGCCATsT | 486 | AD-9551 |
| 1157-1175 | uGGcGGGuGGGuAcAGccGTsT | 487 | CGGCUGuACCcACCCGCcATsT | 488 | AD-9677 |
| 1158-1176 | GGCGGGUGGGUACAGCCGCTT | 489 | GCGGCUGUACCCACCCGCCTT | 490 | AD-15230 |
| 1162-1180 | GGUGGGUACAGCCGCGUCCTT | 491 | GGACGCGGCUGUACCCACCTT | 492 | AD-15231 |
| 1164-1182 | UGGGUACAGCCGCGUCCUCTT | 493 | GAGGACGCGGCUGUACCCATT | 494 | AD-15285 |
| 1172-1190 | GCCGCGUCCUCAACGCCGCTT | 495 | GCGGCGUUGAGGACGCGGCTT | 496 | AD-15396 |
| 1173-1191 | CCGCGUCCUCAACGCCGCCTT | 497 | GGCGGCGUUGAGGACGCGGTT | 498 | AD-15397 |
| 1216-1234 | GUCGUGCUGGUCACCGCUGTsT | 499 | CAGCGGUGACCAGCACGACTsT | 500 | AD-9600 |
| 1216-1234 | GucGuGcuGGucAccGcuGTsT | 501 | cAGCGGUGACcAGcACGACTsT | 502 | AD-9726 |
| 1217-1235 | UCGUGCUGGUCACCGCUGCTsT | 503 | GCAGCGGUGACCAGCACGATsT | 504 | AD-9606 |
| 1217-1235 | ucGuGcuGGucAccGcuGcTsT | 505 | GcAGCGGUGACcAGcACGATsT | 506 | AD-9732 |
| 1223-1241 | UGGUCACCGCUGCCGGCAATsT | 507 | UUGCCGGCAGCGGUGACCATsT | 508 | AD-9633 |
| 1223-1241 | uGGucAccGcuGccGGcAATsT | 509 | UUGCCGGcAGCGGUGACcATsT | 510 | AD-9759 |
| 1224-1242 | GGUCACCGCUGCCGGCAACTsT | 511 | GUUGCCGGCAGCGGUGACCTsT | 512 | AD-9588 |
| 1224-1242 | GGucAccGcuGccGGcAAcTsT | 513 | GUUGCCGGcAGCGGUGACCTsT | 514 | AD-9714 |
| 1227-1245 | CACCGCUGCCGGCAACUUCTsT | 515 | GAAGUUGCCGGCAGCGGUGTsT | 516 | AD-9589 |
| 1227-1245 | cAccGcuGccGGcAAcuucTsT | 517 | GAAGUUGCCGGcAGCGGUGTsT | 518 | AD-9715 |
| 1229-1247 | CCGCUGCCGGCAACUUCCGTsT | 519 | CGGAAGUUGCCGGCAGCGGTsT | 520 | AD-9575 |
| 1229-1247 | ccGcuGccGGcAAcuuccGTsT | 521 | CGGAAGUUGCCGGcAGCGGTsT | 522 | AD-9701 |
| 1230-1248 | CGCUGCCGGCAACUUCCGGTsT | 523 | CCGGAAGUUGCCGGCAGCGTsT | 524 | AD-9563 |
| 1230-1248 | cGcuGccGGcAAcuuccGGTsT | 525 | CCGGAAGUUGCCGGcAGCGTsT | 526 | AD-9689 |
| 1231-1249 | GCUGCCGGCAACUUCCGGGTsT | 527 | CCCGGAAGUUGCCGGCAGCTsT | 528 | AD-9594 |
| 1231-1249 | GcuGccGGcAAcuuccGGGTsT | 529 | CCCGGAAGUUGCCGGcAGCTsT | 530 | AD-9720 |
| 1236-1254 | CGGCAACUUCCGGGACGAUTsT | 531 | AUCGUCCCGGAAGUUGCCGTsT | 532 | AD-9585 |
| 1236-1254 | cGGcAAcuuccGGGAcGAuTsT | 533 | AUCGUCCCGGAAGUUGCCGTsT | 534 | AD-9711 |
| 1237-1255 | GGCAACUUCCGGGACGAUGTsT | 535 | CAUCGUCCCGGAAGUUGCCTsT | 536 | AD-9614 |
| 1237-1255 | GGcAAcuuccGGGAcGAuGTsT | 537 | cAUCGUCCCGGAAGUUGCCTsT | 538 | AD-9740 |
| 1243-1261 | UUCCGGGACGAUGCCUGCCTsT | 539 | GGCAGGCAUCGUCCCGGAATsT | 540 | AD-9615 |
| 1243-1261 | uuccGGGAcGAuGccuGccTsT | 541 | GGcAGGcAUCGUCCCGGAATsT | 542 | AD-9741 |
| 1248-1266 | GGACGAUGCCUGCCUCUACTsT | 543 | GUAGAGGCAGGCAUCGUCCTsT | 544 | AD-9534 |
| 1248-1266 | GGACGAUGCCUGCCUCUACTsT | 545 | GUAGAGGCAGGCAUCGUCCTsT | 546 | AD-9534 |
| 1248-1266 | GGAcGAuGccuGccucuAcTsT | 547 | GuAGAGGcAGGcAUCGUCCTsT | 548 | AD-9660 |
| 1279-1297 | GCUCCCGAGGUCAUCACAGTT | 549 | CUGUGAUGACCUCGGGAGCTT | 550 | AD-15324 |
| 1280-1298 | CUCCCGAGGUCAUCACAGUTT | 551 | ACUGUGAUGACCUCGGGAGTT | 552 | AD-15232 |
| 1281-1299 | UCCCGAGGUCAUCACAGUUTT | 553 | AACUGUGAUGACCUCGGGATT | 554 | AD-15233 |
| 1314-1332 | CCAAGACCAGCCGGUGACCTT | 555 | GGUCACCGGCUGGUCUUGGTT | 556 | AD-15234 |
| 1315-1333 | CAAGACCAGCCGGUGACCCTT | 557 | GGGUCACCGGCUGGUCUUGTT | 558 | AD-15286 |
| 1348-1366 | ACCAACUUUGGCCGCUGUGTsT | 559 | CACAGCGGCCAAAGUUGGUTsT | 560 | AD-9590 |
| 1348-1366 | AccAAcuuuGGccGcuGuGTsT | 561 | cAcAGCGGCcAAAGUUGGUTsT | 562 | AD-9716 |
| 1350-1368 | CAACUUUGGCCGCUGUGUGTsT | 563 | CACACAGCGGCCAAAGUUGTsT | 564 | AD-9632 |
| 1350-1368 | cAAcuuuGGccGcuGuGuGTsT | 565 | cAcAcAGCGGCcAAAGUUGTsT | 566 | AD-9758 |
| 1360-1378 | CGCUGUGUGGACCUCUUUGTsT | 567 | CAAAGAGGUCCACACAGCGTsT | 568 | AD-9567 |
| 1360-1378 | cGcuGuGuGGAccucuuuGTsT | 569 | cAAAGAGGUCcAcAcAGCGTsT | 570 | AD-9693 |
| 1390-1408 | GACAUCAUUGGUGCCUCCATsT | 571 | UGGAGGCACCAAUGAUGUCTsT | 572 | AD-9586 |
| 1390-1408 | GAcAucAuuGGuGccuccATsT | 573 | UGGAGGcACcAAUGAUGUCTsT | 574 | AD-9712 |
| 1394-1412 | UCAUUGGUGCCUCCAGCGATsT | 575 | UCGCUGGAGGCACCAAUGATsT | 576 | AD-9564 |
| 1394-1412 | ucAuuGGuGccuccAGcGATsT | 577 | UCGCUGGAGGcACcAAUGATsT | 578 | AD-9690 |
| 1417-1435 | AGCACCUGCUUUGUGUCACTsT | 579 | GUGACACAAAGCAGGUGCUTsT | 580 | AD-9616 |
| 1417-1435 | AGcAccuGcuuuGuGucAcTsT | 581 | GUGAcAcAAAGcAGGUGCUTsT | 582 | AD-9742 |
| 1433-1451 | CACAGAGUGGGACAUCACATT | 583 | UGUGAUGUCCCACUCUGUGTT | 584 | AD-15398 |
| 1486-1504 | AUGCUGUCUGCCGAGCCGGTsT | 585 | CCGGCUCGGCAGACAGCAUTsT | 586 | AD-9617 |
| 1486-1504 | AuGcuGucuGccGAGccGGTsT | 587 | CCGGCUCGGcAGAcAGcAUTsT | 588 | AD-9743 |
| 1491-1509 | GUCUGCCGAGCCGGAGCUCTsT | 589 | GAGCUCCGGCUCGGCAGACTsT | 590 | AD-9635 |
| 1491-1509 | GucuGccGAGccGGAGcucTsT | 591 | GAGCUCCGGCUCGGcAGACTsT | 592 | AD-9761 |
| 1521-1539 | GUUGAGGCAGAGACUGAUCTsT | 593 | GAUCAGUCUCUGCCUCAACTsT | 594 | AD-9568 |
| 1521-1539 | GuuGAGGcAGAGAcuGAucTsT | 595 | GAUcAGUCUCUGCCUcAACTsT | 596 | AD-9694 |
| 1527-1545 | GCAGAGACUGAUCCACUUCTsT | 597 | GAAGUGGAUCAGUCUCUGCTsT | 598 | AD-9576 |
| 1527-1545 | GcAGAGAcuGAuccAcuucTsT | 599 | GAAGUGGAUcAGUCUCUGCTsT | 600 | AD-9702 |
| 1529-1547 | AGAGACUGAUCCACUUCUCTsT | 601 | GAGAAGUGGAUCAGUCUCUTsT | 602 | AD-9627 |
| 1529-1547 | AGAGAcuGAuccAcuucucTsT | 603 | GAGAAGUGGAUcAGUCUCUTsT | 604 | AD-9753 |
| 1543-1561 | UUCUCUGCCAAAGAUGUCATsT | 605 | UGACAUCUUUGGCAGAGAATsT | 606 | AD-9628 |
| 1543-1561 | uucucuGccAAAGAuGucATsT | 607 | UGAcAUCUUUGGcAGAGAATsT | 608 | AD-9754 |
| 1545-1563 | CUCUGCCAAAGAUGUCAUCTsT | 609 | GAUGACAUCUUUGGCAGAGTsT | 610 | AD-9631 |
| 1545-1563 | cucuGccAAAGAuGucAucTsT | 611 | GAUGAcAUCUUUGGcAGAGTsT | 612 | AD-9757 |
| 1580-1598 | CUGAGGACCAGCGGGUACUTsT | 613 | AGUACCCGCUGGUCCUCAGTsT | 614 | AD-9595 |
| 1580-1598 | cuGAGGAccAGcGGGuAcuTsT | 615 | AGuACCCGCUGGUCCUcAGTsT | 616 | AD-9721 |
| 1581-1599 | UGAGGACCAGCGGGUACUGTsT | 617 | CAGUACCCGCUGGUCCUCATsT | 618 | AD-9544 |
| 1581-1599 | uGAGGAccAGcGGGuAcuGTsT | 619 | cAGuACCCGCUGGUCCUcATsT | 620 | AD-9670 |
| 1666-1684 | ACUGUAUGGUCAGCACACUTT | 621 | AGUGUGCUGACCAUACAGUTT | 622 | AD-15235 |
| 1668-1686 | UGUAUGGUCAGCACACUCGTT | 623 | CGAGUGUGCUGACCAUACATT | 624 | AD-15236 |
| 1669-1687 | GUAUGGUCAGCACACUCGGTT | 625 | CCGAGUGUGCUGACCAUACTT | 626 | AD-15168 |
| 1697-1715 | GGAUGGCCACAGCCGUCGCTT | 627 | GCGACGGCUGUGGCCAUCCTT | 628 | AD-15174 |
| 1698-1716 | GAUGGCCACAGCCGUCGCCTT | 629 | GGCGACGGCUGUGGCCAUCTT | 630 | AD-15325 |
| 1806-1824 | CAAGCUGGUCUGCCGGGCCTT | 631 | GGCCCGGCAGACCAGCUUGTT | 632 | AD-15326 |
| 1815-1833 | CUGCCGGGCCCACAACGCUTsT | 633 | AGCGUUGUGGGCCCGGCAGTsT | 634 | AD-9570 |
| 1815-1833 | cuGccGGGcccAcAAcGcuTsT | 635 | AGCGUUGUGGGCCCGGcAGTsT | 636 | AD-9696 |
| 1816-1834 | UGCCGGGCCCACAACGCUUTsT | 637 | AAGCGUUGUGGGCCCGGCATsT | 638 | AD-9566 |
| 1816-1834 | uGccGGGcccAcAAcGcuuTsT | 639 | AAGCGUUGUGGGCCCGGcATsT | 640 | AD-9692 |
| 1818-1836 | CCGGGCCCACAACGCUUUUTsT | 641 | AAAAGCGUUGUGGGCCCGGTsT | 642 | AD-9532 |
| 1818-1836 | ccGGGcccAcAAcGcuuuuTsT | 643 | AAAAGCGUUGUGGGCCCGGTsT | 644 | AD-9658 |
| 1820-1838 | GGGCCCACAACGCUUUUGGTsT | 645 | CCAAAAGCGUUGUGGGCCCTsT | 646 | AD-9549 |
| 1820-1838 | GGGcccAcAAcGcuuuuGGTsT | 647 | CcAAAAGCGUUGUGGGCCCTsT | 648 | AD-9675 |
| 1840-1858 | GGUGAGGGUGUCUACGCCATsT | 649 | UGGCGUAGACACCCUCACCTsT | 650 | AD-9541 |
| 1840-1858 | GGuGAGGGuGucuAcGccATsT | 651 | UGGCGuAGAcACCCUcACCTsT | 652 | AD-9667 |
| 1843-1861 | GAGGGUGUCUACGCCAUUGTsT | 653 | CAAUGGCGUAGACACCCUCTsT | 654 | AD-9550 |
| 1843-1861 | GAGGGuGucuAcGccAuuGTsT | 655 | cAAUGGCGuAGAcACCCUCTsT | 656 | AD-9676 |
| 1861-1879 | GCCAGGUGCUGCCUGCUACTsT | 657 | GUAGCAGGCAGCACCUGGCTsT | 658 | AD-9571 |
| 1861-1879 | GccAGGuGcuGccuGcuAcTsT | 659 | GuAGcAGGcAGcACCUGGCTsT | 660 | AD-9697 |
| 1862-1880 | CCAGGUGCUGCCUGCUACCTsT | 661 | GGUAGCAGGCAGCACCUGGTsT | 662 | AD-9572 |
| 1862-1880 | ccAGGuGcuGccuGcuAccTsT | 663 | GGuAGcAGGcAGcACCUGGTsT | 664 | AD-9698 |
| 2008-2026 | ACCCACAAGCCGCCUGUGCTT | 665 | GCACAGGCGGCUUGUGGGUTT | 666 | AD-15327 |
| 2023-2041 | GUGCUGAGGCCACGAGGUCTsT | 667 | GACCUCGUGGCCUCAGCACTsT | 668 | AD-9639 |
| 2023-2041 | GuGcuGAGGccAcGAGGucTsT | 669 | GACCUCGUGGCCUcAGcACTsT | 670 | AD-9765 |
| 2024-2042 | UGCUGAGGCCACGAGGUCATsT | 671 | UGACCUCGUGGCCUCAGCATsT | 672 | AD-9518 |
| 2024-2042 | UGCUGAGGCCACGAGGUCATsT | 673 | UGACCUCGUGGCCUCAGCATsT | 674 | AD-9518 |
| 2024-2042 | uGcuGAGGccAcGAGGucATsT | 675 | UGACCUCGUGGCCUcAGcATsT | 676 | AD-9644 |
| 2024-2042 | UfgCfuGfaGfgCfcAfcGfaGfgUfcAfTsT | 677 | p-uGfaCfcUfcGfuGfgCfcUfcAfgCfaTsT | 678 | AD-14672 |
| 2024-2042 | UfGCfUfGAGGCfCfACfGAGGUfCfATsT | 679 | UfGACfCfUfCfGUfGGCfCfUfCfAGCfATsT | 680 | AD-14682 |
| 2024-2042 | UgCuGaGgCcAcGaGgUcATsT | 681 | p-uGfaCfcUfcGfuGfgCfcUfcAfgCfaTsT | 682 | AD-14692 |
| 2024-2042 | UgCuGaGgCcAcGaGgUcATsT | 683 | UfGACfCfUfCfGUfGGCfCfUfCfAGCfATsT | 684 | AD-14702 |
| 2024-2042 | UfgCfuGfaGfgCfcAfcGfaGfgUfcAfTsT | 685 | UGACCucGUggCCUCAgcaTsT | 686 | AD-14712 |
| 2024-2042 | UfGCfUfGAGGCfCfACfGAGGUfCfATsT | 687 | UGACCucGUggCCUCAgcaTsT | 688 | AD-14722 |
| 2024-2042 | UgCuGaGgCcAcGaGgUcATsT | 689 | UGACCucGUggCCUCAgcaTsT | 690 | AD-14732 |
| 2024-2042 | GfuGfgUfcAfgCfgGfcCfgGfgAfuGfTsT | 691 | p-cAMCfcCfgGfcCfgCfuGfaCfcAfcTsT | 692 | AD-15078 |
| 2024-2042 | GUfGGUfCfAGCfGGCfCfGGGAUfGTsT | 693 | CfAUfCfCfCfGGCfCfGCfUfGACfCfACfTsT | 694 | AD-15088 |
| 2024-2042 | GuGgUcAgCgGcCgGgAuGTsT | 695 | p-cAMCfcCfgGfcCfgCfuGfaCfcAfcTsT | 696 | AD-15098 |
| 2024-2042 | GuGgUcAgCgGcCgGgAuGTsT | 697 | CfAUfCfCfCfGGCfCfGCfUfGACfCfACfTsT | 698 | AD-15108 |
| 2024-2042 | GfuGfgUfcAfgCfgGfcCfgGfgAfuGfTsT | 699 | CAUCCcgGCcgCUGACcacTsT | 700 | AD-15118 |
| 2024-2042 | GUfGGUfCfAGCfGGCfCfGGGAUfGTsT | 701 | CAUCCcgGCcgCUGACcacTsT | 702 | AD-15128 |
| 2024-2042 | GuGgUcAgCgGcCgGgAuGTsT | 703 | CAUCCcgGCcgCUGACcacTsT | 704 | AD-15138 |
| 2030-2048 | GGCCACGAGGUCAGCCCAATT | 705 | UUGGGCUGACCUCGUGGCCTT | 706 | AD-15237 |
| 2035-2053 | CGAGGUCAGCCCAACCAGUTT | 707 | ACUGGUUGGGCUGACCUCGTT | 708 | AD-15287 |
| 2039-2057 | GUCAGCCCAACCAGUGCGUTT | 709 | ACGCACUGGUUGGGCUGACTT | 710 | AD-15238 |
| 2041-2059 | CAGCCCAACCAGUGCGUGGTT | 711 | CCACGCACUGGUUGGGCUGTT | 712 | AD-15328 |
| 2062-2080 | CACAGGGAGGCCAGCAUCCTT | 713 | GGAUGCUGGCCUCCCUGUGTT | 714 | AD-15399 |
| 2072-2090 | CCAGCAUCCACGCUUCCUGTsT | 715 | CAGGAAGCGUGGAUGCUGGTsT | 716 | AD-9582 |
| 2072-2090 | ccAGcAuccAcGcuuccuGTsT | 717 | cAGGAAGCGUGGAUGCUGGTsT | 718 | AD-9708 |
| 2118-2136 | AGUCAAGGAGCAUGGAAUCTsT | 719 | GAUUCCAUGCUCCUUGACUTsT | 720 | AD-9545 |
| 2118-2136 | AGucAAGGAGcAuGGAAucTsT | 721 | GAUUCcAUGCUCCUUGACUTsT | 722 | AD-9671 |
| 2118-2136 | AfgUfcAfaGfgAfgCfaUfgGfaAfuCfTsT | 723 | p-gAfuUfcCfaUfgCfuCfcUfuGfaCfuTsT | 724 | AD-14674 |
| 2118-2136 | AGUfCfAAGGAGCfAUfGGAAUfCfTsT | 725 | GAUfUfCfCfAUfGCfUfCfCfUfUfGACfUfTsT | 726 | AD-14684 |
| 2118-2136 | AgUcAaGgAgCaUgGaAuCTsT | 727 | p-gAfuUfcCfaUfgCfuCfcUfuGfaCfuTsT | 728 | AD-14694 |
| 2118-2136 | AgUcAaGgAgCaUgGaAuCTsT | 729 | GAUfUfCfCfAUfGCfUfCfCfUfUfGACfUfTsT | 730 | AD-14704 |
| 2118-2136 | AfgUfcAfaGfgAfgCfaUfgGfaAfuCfTsT | 731 | GAUUCcaUGcuCCUUGacuTsT | 732 | AD-14714 |
| 2118-2136 | AGUfCfAAGGAGCfAUfGGAAUfCfTsT | 733 | GAUUCcaUGcuCCUUGacuTsT | 734 | AD-14724 |
| 2118-2136 | AgUcAaGgAgCaUgGaAuCTsT | 735 | GAUUCcaUGcuCCUUGacuTsT | 736 | AD-14734 |
| 2118-2136 | GfcGfgCfaCfcCfuCfaUfaGfgCfcUfTsT | 737 | p-aGfgCfcUfaUfgAfgGfgUfgCfcGfcTsT | 738 | AD-15080 |
| 2118-2136 | GCfGGCfACfCfCfUfCfAUfAGGCfCfUfTsT | 739 | AGGCfCfUfAUfGAGGGUfGCfCfGCfTsT | 740 | AD-15090 |
| 2118-2136 | GcGgCaCcCuCaUaGgCcUTsT | 741 | p-aGfgCfcUfaUfgAfgGfgUfgCfcGfcTsT | 742 | AD-15100 |
| 2118-2136 | GcGgCaCcCuCaUaGgCcUTsT | 743 | AGGCfCfUfAUfGAGGGUfGCfCfGCfTsT | 744 | AD-15110 |
| 2118-2136 | GfcGfgCfaCfcCfuCfaUfaGfgCfcUfTsT | 745 | AGGCCuaUGagGGUGCcgcTsT | 746 | AD-15120 |
| 2118-2136 | GCfGGCfACfCfCfUfCfAUfAGGCfCfUfTsT | 747 | AGGCCuaUGagGGUGCcgcTsT | 748 | AD-15130 |
| 2118-2136 | GcGgCaCcCuCaUaGgCcUTsT | 749 | AGGCCuaUGagGGUGCcgcTsT | 750 | AD-15140 |
| 2122-2140 | AAGGAGCAUGGAAUCCCGGTsT | 751 | CCGGGAUUCCAUGCUCCUUTsT | 752 | AD-9522 |
| 2122-2140 | AAGGAGcAuGGAAucccGGTsT | 753 | CCGGGAUUCcAUGCUCCUUTsT | 754 | AD-9648 |
| 2123-2141 | AGGAGCAUGGAAUCCCGGCTsT | 755 | GCCGGGAUUCCAUGCUCCUTsT | 756 | AD-9552 |
| 2123-2141 | AGGAGcAuGGAAucccGGcTsT | 757 | GCCGGGAUUCcAUGCUCCUTsT | 758 | AD-9678 |
| 2125-2143 | GAGCAUGGAAUCCCGGCCCTsT | 759 | GGGCCGGGAUUCCAUGCUCTsT | 760 | AD-9618 |
| 2125-2143 | GAGcAuGGAAucccGGcccTsT | 761 | GGGCCGGGAUUCcAUGCUCTsT | 762 | AD-9744 |
| 2230-2248 | GCCUACGCCGUAGACAACATT | 763 | UGUUGUCUACGGCGUAGGCTT | 764 | AD-15239 |
| 2231-2249 | CCUACGCCGUAGACAACACTT | 765 | GUGUUGUCUACGGCGUAGGTT | 766 | AD-15212 |
| 2232-2250 | CUACGCCGUAGACAACACGTT | 767 | CGUGUUGUCUACGGCGUAGTT | 768 | AD-15240 |
| 2233-2251 | UACGCCGUAGACAACACGUTT | 769 | ACGUGUUGUCUACGGCGUATT | 770 | AD-15177 |
| 2235-2253 | CGCCGUAGACAACACGUGUTT | 771 | ACACGUGUUGUCUACGGCGTT | 772 | AD-15179 |
| 2236-2254 | GCCGUAGACAACACGUGUGTT | 773 | CACACGUGUUGUCUACGGCTT | 774 | AD-15180 |
| 2237-2255 | CCGUAGACAACACGUGUGUTT | 775 | ACACACGUGUUGUCUACGGTT | 776 | AD-15241 |
| 2238-2256 | CGUAGACAACACGUGUGUATT | 777 | UACACACGUGUUGUCUACGTT | 778 | AD-15268 |
| 2240-2258 | UAGACAACACGUGUGUAGUTT | 779 | ACUACACACGUGUUGUCUATT | 780 | AD-15242 |
| 2241-2259 | AGACAACACGUGUGUAGUCTT | 781 | GACUACACACGUGUUGUCUTT | 782 | AD-15216 |
| 2242-2260 | GACAACACGUGUGUAGUCATT | 783 | UGACUACACACGUGUUGUCTT | 784 | AD-15176 |
| 2243-2261 | ACAACACGUGUGUAGUCAGTT | 785 | CUGACUACACACGUGUUGUTT | 786 | AD-15181 |
| 2244-2262 | CAACACGUGUGUAGUCAGGTT | 787 | CCUGACUACACACGUGUUGTT | 788 | AD-15243 |
| 2247-2265 | CACGUGUGUAGUCAGGAGCTT | 789 | GCUCCUGACUACACACGUGTT | 790 | AD-15182 |
| 2248-2266 | ACGUGUGUAGUCAGGAGCCTT | 791 | GGCUCCUGACUACACACGUTT | 792 | AD-15244 |
| 2249-2267 | CGUGUGUAGUCAGGAGCCGTT | 793 | CGGCUCCUGACUACACACGTT | 794 | AD-15387 |
| 2251-2269 | UGUGUAGUCAGGAGCCGGGTT | 795 | CCCGGCUCCUGACUACACATT | 796 | AD-15245 |
| 2257-2275 | GUCAGGAGCCGGGACGUCATsT | 797 | UGACGUCCCGGCUCCUGACTsT | 798 | AD-9555 |
| 2257-2275 | GucAGGAGccGGGAcGucATsT | 799 | UGACGUCCCGGCUCCUGACTsT | 800 | AD-9681 |
| 2258-2276 | UCAGGAGCCGGGACGUCAGTsT | 801 | CUGACGUCCCGGCUCCUGATsT | 802 | AD-9619 |
| 2258-2276 | ucAGGAGccGGGAcGucAGTsT | 803 | CUGACGUCCCGGCUCCUGATsT | 804 | AD-9745 |
| 2259-2277 | CAGGAGCCGGGACGUCAGCTsT | 805 | GCUGACGUCCCGGCUCCUGTsT | 806 | AD-9620 |
| 2259-2277 | cAGGAGccGGGAcGucAGcTsT | 807 | GCUGACGUCCCGGCUCCUGTsT | 808 | AD-9746 |
| 2263-2281 | AGCCGGGACGUCAGCACUATT | 809 | UAGUGCUGACGUCCCGGCUTT | 810 | AD-15288 |
| 2265-2283 | CCGGGACGUCAGCACUACATT | 811 | UGUAGUGCUGACGUCCCGGTT | 812 | AD-15246 |
| 2303-2321 | CCGUGACAGCCGUUGCCAUTT | 813 | AUGGCAACGGCUGUCACGGTT | 814 | AD-15289 |
| 2317-2335 | GCCAUCUGCUGCCGGAGCCTsT | 815 | GGCUCCGGCAGCAGAUGGCTsT | 816 | AD-9324 |
| 2375-2393 | CCCAUCCCAGGAUGGGUGUTT | 817 | ACACCCAUCCUGGGAUGGGTT | 818 | AD-15329 |
| 2377-2395 | CAUCCCAGGAUGGGUGUCUTT | 819 | AGACACCCAUCCUGGGAUGTT | 820 | AD-15330 |
| 2420-2438 | AGCUUUAAAAUGGUUCCGATT | 821 | UCGGAACCAUUUUAAAGCUTT | 822 | AD-15169 |
| 2421-2439 | GCUUUAAAAUGGUUCCGACTT | 823 | GUCGGAACCAUUUUAAAGCTT | 824 | AD-15201 |
| 2422-2440 | CUUUAAAAUGGUUCCGACUTT | 825 | AGUCGGAACCAUUUUAAAGTT | 826 | AD-15331 |
| 2423-2441 | UUUAAAAUGGUUCCGACUUTT | 827 | AAGUCGGAACCAUUUUAAATT | 828 | AD-15190 |
| 2424-2442 | UUAAAAUGGUUCCGACUUGTT | 829 | CAAGUCGGAACCAUUUUAATT | 830 | AD-15247 |
| 2425-2443 | UAAAAUGGUUCCGACUUGUTT | 831 | ACAAGUCGGAACCAUUUUATT | 832 | AD-15248 |
| 2426-2444 | AAAAUGGUUCCGACUUGUCTT | 833 | GACAAGUCGGAACCAUUUUTT | 834 | AD-15175 |
| 2427-2445 | AAAUGGUUCCGACUUGUCCTT | 835 | GGACAAGUCGGAACCAUUUTT | 836 | AD-15249 |
| 2428-2446 | AAUGGUUCCGACUUGUCCCTT | 837 | GGGACAAGUCGGAACCAUUTT | 838 | AD-15250 |
| 2431-2449 | GGUUCCGACUUGUCCCUCUTT | 839 | AGAGGGACAAGUCGGAACCTT | 840 | AD-15400 |
| 2457-2475 | CUCCAUGGCCUGGCACGAGTT | 841 | CUCGUGCCAGGCCAUGGAGTT | 842 | AD-15332 |
| 2459-2477 | CCAUGGCCUGGCACGAGGGTT | 843 | CCCUCGUGCCAGGCCAUGGTT | 844 | AD-15388 |
| 2545-2563 | GAACUCACUCACUCUGGGUTT | 845 | ACCCAGAGUGAGUGAGUUCTT | 846 | AD-15333 |
| 2549-2567 | UCACUCACUCUGGGUGCCUTT | 847 | AGGCACCCAGAGUGAGUGATT | 848 | AD-15334 |
| 2616-2634 | UUUCACCAUUCAAACAGGUTT | 849 | ACCUGUUUGAAUGGUGAAATT | 850 | AD-15335 |
| 2622-2640 | CAUUCAAACAGGUCGAGCUTT | 851 | AGCUCGACCUGUUUGAAUGTT | 852 | AD-15183 |
| 2623-2641 | AUUCAAACAGGUCGAGCUGTT | 853 | CAGCUCGACCUGUUUGAAUTT | 854 | AD-15202 |
| 2624-2642 | UUCAAACAGGUCGAGCUGUTT | 855 | ACAGCUCGACCUGUUUGAATT | 856 | AD-15203 |
| 2625-2643 | UCAAACAGGUCGAGCUGUGTT | 857 | CACAGCUCGACCUGUUUGATT | 858 | AD-15272 |
| 2626-2644 | CAAACAGGUCGAGCUGUGCTT | 859 | GCACAGCUCGACCUGUUUGTT | 860 | AD-15217 |
| 2627-2645 | AAACAGGUCGAGCUGUGCUTT | 861 | AGCACAGCUCGACCUGUUUTT | 862 | AD-15290 |
| 2628-2646 | AACAGGUCGAGCUGUGCUCTT | 863 | GAGCACAGCUCGACCUGUUTT | 864 | AD-15218 |
| 2630-2648 | CAGGUCGAGCUGUGCUCGGTT | 865 | CCGAGCACAGCUCGACCUGTT | 866 | AD-15389 |
| 2631-2649 | AGGUCGAGCUGUGCUCGGGTT | 867 | CCCGAGCACAGCUCGACCUTT | 868 | AD-15336 |
| 2633-2651 | GUCGAGCUGUGCUCGGGUGTT | 869 | CACCCGAGCACAGCUCGACTT | 870 | AD-15337 |
| 2634-2652 | UCGAGCUGUGCUCGGGUGCTT | 871 | GCACCCGAGCACAGCUCGATT | 872 | AD-15191 |
| 2657-2675 | AGCUGCUCCCAAUGUGCCGTT | 873 | CGGCACAUUGGGAGCAGCUTT | 874 | AD-15390 |
| 2658-2676 | GCUGCUCCCAAUGUGCCGATT | 875 | UCGGCACAUUGGGAGCAGCTT | 876 | AD-15338 |
| 2660-2678 | UGCUCCCAAUGUGCCGAUGTT | 877 | CAUCGGCACAUUGGGAGCATT | 878 | AD-15204 |
| 2663-2681 | UCCCAAUGUGCCGAUGUCCTT | 879 | GGACAUCGGCACAUUGGGATT | 880 | AD-15251 |
| 2665-2683 | CCAAUGUGCCGAUGUCCGUTT | 881 | ACGGACAUCGGCACAUUGGTT | 882 | AD-15205 |
| 2666-2684 | CAAUGUGCCGAUGUCCGUGTT | 883 | CACGGACAUCGGCACAUUGTT | 884 | AD-15171 |
| 2667-2685 | AAUGUGCCGAUGUCCGUGGTT | 885 | CCACGGACAUCGGCACAUUTT | 886 | AD-15252 |
| 2673-2691 | CCGAUGUCCGUGGGCAGAATT | 887 | UUCUGCCCACGGACAUCGGTT | 888 | AD-15339 |
| 2675-2693 | GAUGUCCGUGGGCAGAAUGTT | 889 | CAUUCUGCCCACGGACAUCTT | 890 | AD-15253 |
| 2678-2696 | GUCCGUGGGCAGAAUGACUTT | 891 | AGUCAUUCUGCCCACGGACTT | 892 | AD-15340 |
| 2679-2697 | UCCGUGGGCAGAAUGACUUTT | 893 | AAGUCAUUCUGCCCACGGATT | 894 | AD-15291 |
| 2683-2701 | UGGGCAGAAUGACUUUUAUTT | 895 | AUAAAAGUCAUUCUGCCCATT | 896 | AD-15341 |
| 2694-2712 | ACUUUUAUUGAGCUCUUGUTT | 897 | ACAAGAGCUCAAUAAAAGUTT | 898 | AD-15401 |
| 2700-2718 | AUUGAGCUCUUGUUCCGUGTT | 899 | CACGGAACAAGAGCUCAAUTT | 900 | AD-15342 |
| 2704-2722 | AGCUCUUGUUCCGUGCCAGTT | 901 | CUGGCACGGAACAAGAGCUTT | 902 | AD-15343 |
| 2705-2723 | GCUCUUGUUCCGUGCCAGGTT | 903 | CCUGGCACGGAACAAGAGCTT | 904 | AD-15292 |
| 2710-2728 | UGUUCCGUGCCAGGCAUUCTT | 905 | GAAUGCCUGGCACGGAACATT | 906 | AD-15344 |
| 2711-2729 | GUUCCGUGCCAGGCAUUCATT | 907 | UGAAUGCCUGGCACGGAACTT | 908 | AD-15254 |
| 2712-2730 | UUCCGUGCCAGGCAUUCAATT | 909 | UUGAAUGCCUGGCACGGAATT | 910 | AD-15345 |
| 2715-2733 | CGUGCCAGGCAUUCAAUCCTT | 911 | GGAUUGAAUGCCUGGCACGTT | 912 | AD-15206 |
| 2716-2734 | GUGCCAGGCAUUCAAUCCUTT | 913 | AGGAUUGAAUGCCUGGCACTT | 914 | AD-15346 |
| 2728-2746 | CAAUCCUCAGGUCUCCACCTT | 915 | GGUGGAGACCUGAGGAUUGTT | 916 | AD-15347 |
| 2743-2761 | CACCAAGGAGGCAGGAUUCTsT | 917 | GAAUCCUGCCUCCUUGGUGTsT | 918 | AD-9577 |
| 2743-2761 | cAccAAGGAGGcAGGAuucTsT | 919 | GAAUCCUGCCUCCUUGGUGTsT | 920 | AD-9703 |
| 2743-2761 | CfaCfcAfaGfgAfgGfcAfgGfaUfuCfTsT | 921 | p-gAfaUfcCfuGfcCfuCfcUfuGfgUfgTsT | 922 | AD-14678 |
| 2743-2761 | CfACfCfAAGGAGGCfAGGAUfUfCfTsT | 923 | GAAUfCfCfUfGCfCfUfCfCfUfUfGGUfGTsT | 924 | AD-14688 |
| 2743-2761 | CaCcAaGgAgGcAgGaUuCTsT | 925 | p-gAfaUfcCfuGfcCfuCfcUfuGfgUfgTsT | 926 | AD-14698 |
| 2743-2761 | CaCcAaGgAgGcAgGaUuCTsT | 927 | GAAUfCfCfUfGCfCfUfCfCfUfUfGGUfGTsT | 928 | AD-14708 |
| 2743-2761 | CfaCfcAfaGfgAfgGfcAfgGfaUfuCfTsT | 929 | GAAUCcuGCcuCCUUGgugTsT | 930 | AD-14718 |
| 2743-2761 | CfACfCfAAGGAGGCfAGGAUfUfCfTsT | 931 | GAAUCcuGCcuCCUUGgugTsT | 932 | AD-14728 |
| 2743-2761 | CaCcAaGgAgGcAgGaUuCTsT | 933 | GAAUCcuGCcuCCUUGgugTsT | 934 | AD-14738 |
| 1090-1108 | GfgCfcUfgGfaGfuUfuAfuUfcGfgAfTsT | 935 | p-uCfcGfaAfuAfaAfcUfcCfaGfgCfcTsT | 936 | AD-15084 |
| 1090-1108 | GGCfCfUfGGAGUfUfUfAUfUfCfGGATsT | 937 | UfCfCfGAAUfAAACfUfCfCfAGGCfCfTsT | 938 | AD-15094 |
| 1090-1108 | GgCcUgGaGuUuAuUcGgATsT | 939 | p-uCfcGfaAfuAfaAfcUfcCfaGfgCfcTsT | 940 | AD-15104 |
| 1090-1108 | GgCcUgGaGuUuAuUcGgATsT | 941 | UfCfCfGAAUfAAACfUfCfCfAGGCfCfTsT | 942 | AD-15114 |
| 1090-1108 | GfgCfcUfgGfaGfuUfuAfuUfcGfgAfTsT | 943 | UCCGAauAAacUCCAGgccTsT | 944 | AD-15124 |
| 1090-1108 | GGCfCfUfGGAGUfUfUfAUfUfCfGGATsT | 945 | UCCGAauAAacUCCAGgccTsT | 946 | AD-15134 |
| 1090-1108 | GgCcUgGaGuUuAuUcGgATsT | 947 | UCCGAauAAacUCCAGgccTsT | 948 | AD-15144 |
| 2753-2771 | GCAGGAUUCUUCCCAUGGATT | 949 | UCCAUGGGAAGAAUCCUGCTT | 950 | AD-15391 |
| 2794-2812 | UGCAGGGACAAACAUCGUUTT | 951 | AACGAUGUUUGUCCCUGCATT | 952 | AD-15348 |
| 2795-2813 | GCAGGGACAAACAUCGUUGTT | 953 | CAACGAUGUUUGUCCCUGCTT | 954 | AD-15349 |
| 2797-2815 | AGGGACAAACAUCGUUGGGTT | 955 | CCCAACGAUGUUUGUCCCUTT | 956 | AD-15170 |
| 2841-2859 | CCCUCAUCUCCAGCUAACUTT | 957 | AGUUAGCUGGAGAUGAGGGTT | 958 | AD-15350 |
| 2845-2863 | CAUCUCCAGCUAACUGUGGTT | 959 | CCACAGUUAGCUGGAGAUGTT | 960 | AD-15402 |
| 2878-2896 | GCUCCCUGAUUAAUGGAGGTT | 961 | CCUCCAUUAAUCAGGGAGCTT | 962 | AD-15293 |
| 2881-2899 | CCCUGAUUAAUGGAGGCUUTT | 963 | AAGCCUCCAUUAAUCAGGGTT | 964 | AD-15351 |
| 2882-2900 | CCUGAUUAAUGGAGGCUUATT | 965 | UAAGCCUCCAUUAAUCAGGTT | 966 | AD-15403 |
| 2884-2902 | UGAUUAAUGGAGGCUUAGCTT | 967 | GCUAAGCCUCCAUUAAUCATT | 968 | AD-15404 |
| 2885-2903 | GAUUAAUGGAGGCUUAGCUTT | 969 | AGCUAAGCCUCCAUUAAUCTT | 970 | AD-15207 |
| 2886-2904 | AUUAAUGGAGGCUUAGCUUTT | 971 | AAGCUAAGCCUCCAUUAAUTT | 972 | AD-15352 |
| 2887-2905 | UUAAUGGAGGCUUAGCUUUTT | 973 | AAAGCUAAGCCUCCAUUAATT | 974 | AD-15255 |
| 2903-2921 | UUUCUGGAUGGCAUCUAGCTsT | 975 | GCUAGAUGCCAUCCAGAAATsT | 976 | AD-9603 |
| 2903-2921 | uuucuGGAuGGcAucuAGcTsT | 977 | GCuAGAUGCcAUCcAGAAATsT | 978 | AD-9729 |
| 2904-2922 | UUCUGGAUGGCAUCUAGCCTsT | 979 | GGCUAGAUGCCAUCCAGAATsT | 980 | AD-9599 |
| 2904-2922 | uucuGGAuGGcAucuAGccTsT | 981 | GGCuAGAUGCcAUCcAGAATsT | 982 | AD-9725 |
| 2905-2923 | UCUGGAUGGCAUCUAGCCATsT | 983 | UGGCUAGAUGCCAUCCAGATsT | 984 | AD-9621 |
| 2905-2923 | ucuGGAuGGcAucuAGccATsT | 985 | UGGCuAGAUGCcAUCcAGATsT | 986 | AD-9747 |
| 2925-2943 | AGGCUGGAGACAGGUGCGCTT | 987 | GCGCACCUGUCUCCAGCCUTT | 988 | AD-15405 |
| 2926-2944 | GGCUGGAGACAGGUGCGCCTT | 989 | GGCGCACCUGUCUCCAGCCTT | 990 | AD-15353 |
| 2927-2945 | GCUGGAGACAGGUGCGCCCTT | 991 | GGGCGCACCUGUCUCCAGCTT | 992 | AD-15354 |
| 2972-2990 | UUCCUGAGCCACCUUUACUTT | 993 | AGUAAAGGUGGCUCAGGAATT | 994 | AD-15406 |
| 2973-2991 | UCCUGAGCCACCUUUACUCTT | 995 | GAGUAAAGGUGGCUCAGGATT | 996 | AD-15407 |
| 2974-2992 | CCUGAGCCACCUUUACUCUTT | 997 | AGAGUAAAGGUGGCUCAGGTT | 998 | AD-15355 |
| 2976-2994 | UGAGCCACCUUUACUCUGCTT | 999 | GCAGAGUAAAGGUGGCUCATT | 1000 | AD-15356 |
| 2978-2996 | AGCCACCUUUACUCUGCUCTT | 1001 | GAGCAGAGUAAAGGUGGCUTT | 1002 | AD-15357 |
| 2981-2999 | CACCUUUACUCUGCUCUAUTT | 1003 | AUAGAGCAGAGUAAAGGUGTT | 1004 | AD-15269 |
| 2987-3005 | UACUCUGCUCUAUGCCAGGTsT | 1005 | CCUGGCAUAGAGCAGAGUATsT | 1006 | AD-9565 |
| 2987-3005 | uAcucuGcucuAuGccAGGTsT | 1007 | CCUGGcAuAGAGcAGAGuATsT | 1008 | AD-9691 |
| 2998-3016 | AUGCCAGGCUGUGCUAGCATT | 1009 | UGCUAGCACAGCCUGGCAUTT | 1010 | AD-15358 |
| 3003-3021 | AGGCUGUGCUAGCAACACCTT | 1011 | GGUGUUGCUAGCACAGCCUTT | 1012 | AD-15359 |
| 3006-3024 | CUGUGCUAGCAACACCCAATT | 1013 | UUGGGUGUUGCUAGCACAGTT | 1014 | AD-15360 |
| 3010-3028 | GCUAGCAACACCCAAAGGUTT | 1015 | ACCUUUGGGUGUUGCUAGCTT | 1016 | AD-15219 |
| 3038-3056 | GGAGCCAUCACCUAGGACUTT | 1017 | AGUCCUAGGUGAUGGCUCCTT | 1018 | AD-15361 |
| 3046-3064 | CACCUAGGACUGACUCGGCTT | 1019 | GCCGAGUCAGUCCUAGGUGTT | 1020 | AD-15273 |
| 3051-3069 | AGGACUGACUCGGCAGUGUTT | 1021 | ACACUGCCGAGUCAGUCCUTT | 1022 | AD-15362 |
| 3052-3070 | GGACUGACUCGGCAGUGUGTT | 1023 | CACACUGCCGAGUCAGUCCTT | 1024 | AD-15192 |
| 3074-3092 | UGGUGCAUGCACUGUCUCATT | 1025 | UGAGACAGUGCAUGCACCATT | 1026 | AD-15256 |
| 3080-3098 | AUGCACUGUCUCAGCCAACTT | 1027 | GUUGGCUGAGACAGUGCAUTT | 1028 | AD-15363 |
| 3085-3103 | CUGUCUCAGCCAACCCGCUTT | 1029 | AGCGGGUUGGCUGAGACAGTT | 1030 | AD-15364 |
| 3089-3107 | CUCAGCCAACCCGCUCCACTsT | 1031 | GUGGAGCGGGUUGGCUGAGTsT | 1032 | AD-9604 |
| 3089-3107 | cucAGccAAcccGcuccAcTsT | 1033 | GUGGAGCGGGUUGGCUGAGTsT | 1034 | AD-9730 |
| 3093-3111 | GCCAACCCGCUCCACUACCTsT | 1035 | GGUAGUGGAGCGGGUUGGCTsT | 1036 | AD-9527 |
| 3093-3111 | GccAAcccGcuccAcuAccTsT | 1037 | GGuAGUGGAGCGGGUUGGCTsT | 1038 | AD-9653 |
| 3096-3114 | AACCCGCUCCACUACCCGGTT | 1039 | CCGGGUAGUGGAGCGGGUUTT | 1040 | AD-15365 |
| 3099-3117 | CCGCUCCACUACCCGGCAGTT | 1041 | CUGCCGGGUAGUGGAGCGGTT | 1042 | AD-15294 |
| 3107-3125 | CUACCCGGCAGGGUACACATT | 1043 | UGUGUACCCUGCCGGGUAGTT | 1044 | AD-15173 |
| 3108-3126 | UACCCGGCAGGGUACACAUTT | 1045 | AUGUGUACCCUGCCGGGUATT | 1046 | AD-15366 |
| 3109-3127 | ACCCGGCAGGGUACACAUUTT | 1047 | AAUGUGUACCCUGCCGGGUTT | 1048 | AD-15367 |
| 3110-3128 | CCCGGCAGGGUACACAUUCTT | 1049 | GAAUGUGUACCCUGCCGGGTT | 1050 | AD-15257 |
| 3112-3130 | CGGCAGGGUACACAUUCGCTT | 1051 | GCGAAUGUGUACCCUGCCGTT | 1052 | AD-15184 |
| 3114-3132 | GCAGGGUACACAUUCGCACTT | 1053 | GUGCGAAUGUGUACCCUGCTT | 1054 | AD-15185 |
| 3115-3133 | CAGGGUACACAUUCGCACCTT | 1055 | GGUGCGAAUGUGUACCCUGTT | 1056 | AD-15258 |
| 3116-3134 | AGGGUACACAUUCGCACCCTT | 1057 | GGGUGCGAAUGUGUACCCUTT | 1058 | AD-15186 |
| 3196-3214 | GGAACUGAGCCAGAAACGCTT | 1059 | GCGUUUCUGGCUCAGUUCCTT | 1060 | AD-15274 |
| 3197-3215 | GAACUGAGCCAGAAACGCATT | 1061 | UGCGUUUCUGGCUCAGUUCTT | 1062 | AD-15368 |
| 3198-3216 | AACUGAGCCAGAAACGCAGTT | 1063 | CUGCGUUUCUGGCUCAGUUTT | 1064 | AD-15369 |
| 3201-3219 | UGAGCCAGAAACGCAGAUUTT | 1065 | AAUCUGCGUUUCUGGCUCATT | 1066 | AD-15370 |
| 3207-3225 | AGAAACGCAGAUUGGGCUGTT | 1067 | CAGCCCAAUCUGCGUUUCUTT | 1068 | AD-15259 |
| 3210-3228 | AACGCAGAUUGGGCUGGCUTT | 1069 | AGCCAGCCCAAUCUGCGUUTT | 1070 | AD-15408 |
| 3233-3251 | AGCCAAGCCUCUUCUUACUTsT | 1071 | AGUAAGAAGAGGCUUGGCUTsT | 1072 | AD-9597 |
| 3233-3251 | AGccAAGccucuucuuAcuTsT | 1073 | AGuAAGAAGAGGCUUGGCUTsT | 1074 | AD-9723 |
| 3233-3251 | AfgCfcAfaGfcCfuCfuUfcUfuAfcUfTsT | 1075 | p-aGfuAfaGfaAfgAfgGfcUfuGfgCfuTsT | 1076 | AD-14680 |
| 3233-3251 | AGCfCfAAGCfCfUfCfUfUfCfUfUfACfUfTsT | 1077 | AGUfAAGAAGAGGCfUfUfGGCfUfTsT | 1078 | AD-14690 |
| 3233-3251 | AgCcAaGcCuCuUcUuAcUTsT | 1079 | p-aGfuAfaGfaAfgAfgGfcUfuGfgCfuTsT | 1080 | AD-14700 |
| 3233-3251 | AgCcAaGcCuCuUcUuAcUTsT | 1081 | AGUfAAGAAGAGGCfUfUfGGCfUfTsT | 1082 | AD-14710 |
| 3233-3251 | AfgCfcAfaGfcCfuCfuUfcUfuAfcUfTsT | 1083 | AGUAAgaAGagGCUUGgcuTsT | 1084 | AD-14720 |
| 3233-3251 | AGCfCfAAGCfCfUfCfUfUfCfUfUfACfUfTsT | 1085 | AGUAAgaAGagGCUUGgcuTsT | 1086 | AD-14730 |
| 3233-3251 | AgCcAaGcCuCuUcUuAcUTsT | 1087 | AGUAAgaAGagGCUUGgcuTsT | 1088 | AD-14740 |
| 3233-3251 | UfgGfuUfcCfcUfgAfgGfaCfcAfgCfTsT | 1089 | p-gCfuGfgUfcCfuCfaGfgGfaAfcCfaTsT | 1090 | AD-15086 |
| 3233-3251 | UfGGUfUfCfCfCfUfGAGGACfCfAGCfTsT | 1091 | GCfUfGGUfCfCfUfCfAGGGAACfCfATsT | 1092 | AD-15096 |
| 3233-3251 | UgGuUcCcUgAgGaCcAgCTsT | 1093 | p-gCfuGfgUfcCfuCfaGfgGfaAfcCfaTsT | 1094 | AD-15106 |
| 3233-3251 | UgGuUcCcUgAgGaCcAgCTsT | 1095 | GCfUfGGUfCfCfUfCfAGGGAACfCfATsT | 1096 | AD-15116 |
| 3233-3251 | UfgGfuUfcCfcUfgAfgGfaCfcAfgCfTsT | 1097 | GCUGGucCUcaGGGAAccaTsT | 1098 | AD-15126 |
| 3233-3251 | UfGGUfUfCfCfCfUfGAGGACfCfAGCfTsT | 1099 | GCUGGucCUcaGGGAAccaTsT | 1100 | AD-15136 |
| 3233-3251 | UgGuUcCcUgAgGaCcAgCTsT | 1101 | GCUGGucCUcaGGGAAccaTsT | 1102 | AD-15146 |
| 3242-3260 | UCUUCUUACUUCACCCGGCTT | 1103 | GCCGGGUGAAGUAAGAAGATT | 1104 | AD-15260 |
| 3243-3261 | CUUCUUACUUCACCCGGCUTT | 1105 | AGCCGGGUGAAGUAAGAAGTT | 1106 | AD-15371 |
| 3244-3262 | UUCUUACUUCACCCGGCUGTT | 1107 | CAGCCGGGUGAAGUAAGAATT | 1108 | AD-15372 |
| 3262-3280 | GGGCUCCUCAUUUUUACGGTT | 1109 | CCGUAAAAAUGAGGAGCCCTT | 1110 | AD-15172 |
| 3263-3281 | GGCUCCUCAUUUUUACGGGTT | 1111 | CCCGUAAAAAUGAGGAGCCTT | 1112 | AD-15295 |
| 3264-3282 | GCUCCUCAUUUUUACGGGUTT | 1113 | ACCCGUAAAAAUGAGGAGCTT | 1114 | AD-15373 |
| 3265-3283 | CUCCUCAUUUUUACGGGUATT | 1115 | UACCCGUAAAAAUGAGGAGTT | 1116 | AD-15163 |
| 3266-3284 | UCCUCAUUUUUACGGGUAATT | 1117 | UUACCCGUAAAAAUGAGGATT | 1118 | AD-15165 |
| 3267-3285 | CCUCAUUUUUACGGGUAACTT | 1119 | GUUACCCGUAAAAAUGAGGTT | 1120 | AD-15374 |
| 3268-3286 | CUCAUUUUUACGGGUAACATT | 1121 | UGUUACCCGUAAAAAUGAGTT | 1122 | AD-15296 |
| 3270-3288 | CAUUUUUACGGGUAACAGUTT | 1123 | ACUGUUACCCGUAAAAAUGTT | 1124 | AD-15261 |
| 3271-3289 | AUUUUUACGGGUAACAGUGTT | 1125 | CACUGUUACCCGUAAAAAUTT | 1126 | AD-15375 |
| 3274-3292 | UUUACGGGUAACAGUGAGGTT | 1127 | CCUCACUGUUACCCGUAAATT | 1128 | AD-15262 |
| 3308-3326 | CAGACCAGGAAGCUCGGUGTT | 1129 | CACCGAGCUUCCUGGUCUGTT | 1130 | AD-15376 |
| 3310-3328 | GACCAGGAAGCUCGGUGAGTT | 1131 | CUCACCGAGCUUCCUGGUCTT | 1132 | AD-15377 |
| 3312-3330 | CCAGGAAGCUCGGUGAGUGTT | 1133 | CACUCACCGAGCUUCCUGGTT | 1134 | AD-15409 |
| 3315-3333 | GGAAGCUCGGUGAGUGAUGTT | 1135 | CAUCACUCACCGAGCUUCCTT | 1136 | AD-15378 |
| 3324-3342 | GUGAGUGAUGGCAGAACGATT | 1137 | UCGUUCUGCCAUCACUCACTT | 1138 | AD-15410 |
| 3326-3344 | GAGUGAUGGCAGAACGAUGTT | 1139 | CAUCGUUCUGCCAUCACUCTT | 1140 | AD-15379 |
| 3330-3348 | GAUGGCAGAACGAUGCCUGTT | 1141 | CAGGCAUCGUUCUGCCAUCTT | 1142 | AD-15187 |
| 3336-3354 | AGAACGAUGCCUGCAGGCATT | 1143 | UGCCUGCAGGCAUCGUUCUTT | 1144 | AD-15263 |
| 3339-3357 | ACGAUGCCUGCAGGCAUGGTT | 1145 | CCAUGCCUGCAGGCAUCGUTT | 1146 | AD-15264 |
| 3348-3366 | GCAGGCAUGGAACUUUUUCTT | 1147 | GAAAAAGUUCCAUGCCUGCTT | 1148 | AD-15297 |
| 3356-3374 | GGAACUUUUUCCGUUAUCATT | 1149 | UGAUAACGGAAAAAGUUCCTT | 1150 | AD-15208 |
| 3357-3375 | GAACUUUUUCCGUUAUCACTT | 1151 | GUGAUAACGGAAAAAGUUCTT | 1152 | AD-15209 |
| 3358-3376 | AACUUUUUCCGUUAUCACCTT | 1153 | GGUGAUAACGGAAAAAGUUTT | 1154 | AD-15193 |
| 3370-3388 | UAUCACCCAGGCCUGAUUCTT | 1155 | GAAUCAGGCCUGGGUGAUATT | 1156 | AD-15380 |
| 3378-3396 | AGGCCUGAUUCACUGGCCUTT | 1157 | AGGCCAGUGAAUCAGGCCUTT | 1158 | AD-15298 |
| 3383-3401 | UGAUUCACUGGCCUGGCGGTT | 1159 | CCGCCAGGCCAGUGAAUCATT | 1160 | AD-15299 |
| 3385-3403 | AUUCACUGGCCUGGCGGAGTT | 1161 | CUCCGCCAGGCCAGUGAAUTT | 1162 | AD-15265 |
| 3406-3424 | GCUUCUAAGGCAUGGUCGGTT | 1163 | CCGACCAUGCCUUAGAAGCTT | 1164 | AD-15381 |
| 3407-3425 | CUUCUAAGGCAUGGUCGGGTT | 1165 | CCCGACCAUGCCUUAGAAGTT | 1166 | AD-15210 |
| 3429-3447 | GAGGGCCAACAACUGUCCCTT | 1167 | GGGACAGUUGUUGGCCCUCTT | 1168 | AD-15270 |
| 3440-3458 | ACUGUCCCUCCUUGAGCACTsT | 1169 | GUGCUCAAGGAGGGACAGUTsT | 1170 | AD-9591 |
| 3440-3458 | AcuGucccuccuuGAGcAcTsT | 1171 | GUGCUcAAGGAGGGAcAGUTsT | 1172 | AD-9717 |
| 3441-3459 | CUGUCCCUCCUUGAGCACCTsT | 1173 | GGUGCUCAAGGAGGGACAGTsT | 1174 | AD-9622 |
| 3441-3459 | cuGucccuccuuGAGcAccTsT | 1175 | GGUGCUcAAGGAGGGAcAGTsT | 1176 | AD-9748 |
| 3480-3498 | ACAUUUAUCUUUUGGGUCUTsT | 1177 | AGACCCAAAAGAUAAAUGUTsT | 1178 | AD-9587 |
| 3480-3498 | AcAuuuAucuuuuGGGucuTsT | 1179 | AGACCcAAAAGAuAAAUGUTsT | 1180 | AD-9713 |
| 3480-3498 | AfcAfuUfuAfuCfuUfuUfgGfgUfcUfTsT | 1181 | p-aGfaCfcCfaAfaAfgAfuAfaAfuGfuTsT | 1182 | AD-14679 |
| 3480-3498 | ACfAUfUfUfAUfCfUfUfUfUfGGGUfCfUfTsT | 1183 | AGACfCfCfAAAAGAUfAAAUfGUfTsT | 1184 | AD-14689 |
| 3480-3498 | AcAuUuAuCuUuUgGgUcUTsT | 1185 | p-aGfaCfcCfaAfaAfgAfuAfaAfuGfuTsT | 1186 | AD-14699 |
| 3480-3498 | AcAuUuAuCuUuUgGgUcUTsT | 1187 | AGACfCfCfAAAAGAUfAAAUfGUfTsT | 1188 | AD-14709 |
| 3480-3498 | AfcAfuUfuAfuCfuUfuUfgGfgUfcUfTsT | 1189 | AGACCcaAAagAUAAAuguTsT | 1190 | AD-14719 |
| 3480-3498 | ACfAUfUfUfAUfCfUfUfUfUfGGGUfCfUfTsT | 1191 | AGACCcaAAagAUAAAuguTsT | 1192 | AD-14729 |
| 3480-3498 | AcAuUuAuCuUuUgGgUcUTsT | 1193 | AGACCcaAAagAUAAAuguTsT | 1194 | AD-14739 |
| 3480-3498 | GfcCfaUfcUfgCfuGfcCfgGfaGfcCfTsT | 1195 | p-gGfcUfcCfgGfcAfgCfaGfaUfgGfcTsT | 1196 | AD-15085 |
| 3480-3498 | GCfCfAUfCfUfGCfUfGCfCfGGAGCfCfTsT | 1197 | GGCfUfCfCfGGCfAGCfAGAUfGGCfTsT | 1198 | AD-15095 |
| 3480-3498 | GcCaUcUgCuGcCgGaGcCTsT | 1199 | p-gGfcUfcCfgGfcAfgCfaGfaUfgGfcTsT | 1200 | AD-15105 |
| 3480-3498 | GcCaUcUgCuGcCgGaGcCTsT | 1201 | GGCfUfCfCfGGCfAGCfAGAUfGGCfTsT | 1202 | AD-15115 |
| 3480-3498 | GfcCfaUfcUfgCfuGfcCfgGfaGfcCfTsT | 1203 | GGCUCauGCagCAGAUggcTsT | 1204 | AD-15125 |
| 3480-3498 | GCfCfAUfCfUfGCfUfGCfCfGGAGCfCfTsT | 1205 | GGCUCauGCagCAGAUggcTsT | 1206 | AD-15135 |
| 3480-3498 | GcCaUcUgCuGcCgGaGcCTsT | 1207 | GGCUCauGCagCAGAUggcTsT | 1208 | AD-15145 |
| 3481-3499 | CAUUUAUCUUUUGGGUCUGTsT | 1209 | CAGACCCAAAAGAUAAAUGTsT | 1210 | AD-9578 |
| 3481-3499 | cAuuuAucuuuuGGGucuGTsT | 1211 | cAGACCcAAAAGAuAAAUGTsT | 1212 | AD-9704 |
| 3485-3503 | UAUCUUUUGGGUCUGUCCUTsT | 1213 | AGGACAGACCCAAAAGAUATsT | 1214 | AD-9558 |
| 3485-3503 | uAucuuuuGGGucuGuccuTsT | 1215 | AGGAcAGACCcAAAAGAuATsT | 1216 | AD-9684 |
| 3504-3522 | CUCUGUUGCCUUUUUACAGTsT | 1217 | CUGUAAAAAGGCAACAGAGTsT | 1218 | AD-9634 |
| 3504-3522 | cucuGuuGccuuuuuAcAGTsT | 1219 | CUGuAAAAAGGcAAcAGAGTsT | 1220 | AD-9760 |
| 3512-3530 | CCUUUUUACAGCCAACUUUTT | 1221 | AAAGUUGGCUGUAAAAAGGTT | 1222 | AD-15411 |
| 3521-3539 | AGCCAACUUUUCUAGACCUTT | 1223 | AGGUCUAGAAAAGUUGGCUTT | 1224 | AD-15266 |
| 3526-3544 | ACUUUUCUAGACCUGUUUUTT | 1225 | AAAACAGGUCUAGAAAAGUTT | 1226 | AD-15382 |
| 3530-3548 | UUCUAGACCUGUUUUGCUUTsT | 1227 | AAGCAAAACAGGUCUAGAATsT | 1228 | AD-9554 |
| 3530-3548 | uucuAGAccuGuuuuGcuuTsT | 1229 | AAGcAAAAcAGGUCuAGAATsT | 1230 | AD-9680 |
| 3530-3548 | UfuCfuAfgAfcCfuGfuUfuUfgCfuUfTsT | 1231 | p-aAfgCfaAfaAfcAfgGfuCfuAfgAfaTsT | 1232 | AD-14676 |
| 3530-3548 | UfUfCfUfAGACfCfUfGUfUfUfUfGCfUfUfTsT | 1233 | AAGCfAAAACfAGGUfCfUfAGAATsT | 1234 | AD-14686 |
| 3530-3548 | UuCuAgAcCuGuUuUgCuUTsT | 1235 | p-aAfgCfaAfaAfcAfgGfuCfuAfgAfaTsT | 1236 | AD-14696 |
| 3530-3548 | UuCuAgAcCuGuUuUgCuUTsT | 1237 | AAGCfAAAACfAGGUfCfUfAGAATsT | 1238 | AD-14706 |
| 3530-3548 | UfuCfuAfgAfcCfuGfuUfuUffCfuUfTsT | 1239 | AAGcAaaACagGUCUAgaaTsT | 1240 | AD-14716 |
| 3530-3548 | UfUfCfUfAGACfCfUfGUfUfUfUfGCfUfUfTsT | 1241 | AAGcAaaACagGUCUAgaaTsT | 1242 | AD-14726 |
| 3530-3548 | UuCuAgAcCuGuUuUgCuUTsT | 1243 | AAGcAaaACagGUCUAgaaTsT | 1244 | AD-14736 |
| 3530-3548 | CfaUfaGfgCfcUfgGfaGfuUfuAfuUfTsT | 1245 | p-aAthAfaAfcUfcCfaGfgCfcUfaUfgTsT | 1246 | AD-15082 |
| 3530-3548 | CfAUfAGGCfCfUfGGAGUfUfUfAUfUfTsT | 1247 | AAUfAAACfUfCfCfAGGCfCfUfAUfGTsT | 1248 | AD-15092 |
| 3530-3548 | CaUaGgCcUgGaGuUuAuUTsT | 1249 | p-aAthAfaAfcUfcCfaGfgCfcUfaUfgTsT | 1250 | AD-15102 |
| 3530-3548 | CaUaGgCcUgGaGuUuAuUTsT | 1251 | AAUfAAACfUfCfCfAGGCfCfUfAUfGTsT | 1252 | AD-15112 |
| 3530-3548 | CfaUfaGfgCfcUfgGfaGfuUfuAfuUfTsT | 1253 | AAUAAacUCcaGGCCUaugTsT | 1254 | AD-15122 |
| 3530-3548 | CfAUfAGGCfCfUfGGAGUfUfUfAUfUfTsT | 1255 | AAUAAacUCcaGGCCUaugTsT | 1256 | AD-15132 |
| 3530-3548 | CaUaGgCcUgGaGuUuAuUTsT | 1257 | AAUAAacUCcaGGCCUaugTsT | 1258 | AD-15142 |
| 3531-3549 | UCUAGACCUGUUUUGCUUUTsT | 1259 | AAAGCAAAACAGGUCUAGATsT | 1260 | AD-9553 |
| 3531-3549 | ucuAGAccuGuuuuGcuuuTsT | 1261 | AAAGcAAAAcAGGUCuAGATsT | 1262 | AD-9679 |
| 3531-3549 | UfcUfaGfaCfcUfgUfuUfuGfcUfuUfTsT | 1263 | p-aAfaGfcAfaAfaCfaGfgUfcUfaGfaTsT | 1264 | AD-14675 |
| 3531-3549 | UfCfUfAGACfCfUfGUfUfUfUfGCfUfUfUfTsT | 1265 | AAAGCfAAAACfAGGUfCfUfAGATsT | 1266 | AD-14685 |
| 3531-3549 | UcUaGaCcUgUuUuGcUuUTsT | 1267 | p-aAfaGfcAfaAfaCfaGfgUfcUfaGfaTsT | 1268 | AD-14695 |
| 3531-3549 | UcUaGaCcUgUuUuGcUuUTsT | 1269 | AAAGCfAAAACfAGGUfCfUfAGATsT | 1270 | AD-14705 |
| 3531-3549 | UfcUfaGfaCfcUfgUfuUfuGfcUfuUfTsT | 1271 | AAAGCaaAAcaGGUCUagaTsT | 1272 | AD-14715 |
| 3531-3549 | UfCfUfAGACfCfUfGUfUfUfUfGCfUfUfUfTsT | 1273 | AAAGCaaAAcaGGUCUagaTsT | 1274 | AD-14725 |
| 3531-3549 | UcUaGaCcUgUuUuGcUuUTsT | 1275 | AAAGCaaAAcaGGUCUagaTsT | 1276 | AD-14735 |
| 3531-3549 | UfcAfuAfgGfcCfuGfgAfgUfuUfaUfTsT | 1277 | p-aUfaAfaCfuCfcAfgGfcCfuAfuGfaTsT | 1278 | AD-15081 |
| 3531-3549 | UfCfAUfAGGCfCfUfGGAGUfUfUfAUfTsT | 1279 | AUfAAACfUfCfCfAGGCfCfUfAUfGATsT | 1280 | AD-15091 |
| 3531-3549 | UcAuAgGcCuGgAgUuUaUTsT | 1281 | p-aUfaAfaCfuCfcAfgGfcCfuAfuGfaTsT | 1282 | AD-15101 |
| 3531-3549 | UcAuAgGcCuGgAgUuUaUTsT | 1283 | AUfAAACfUfCfCfAGGCfCfUfAUfGATsT | 1284 | AD-15111 |
| 3531-3549 | UfcAfuAfgGfcCfuGfgAfgUfuUfaUfTsT | 1285 | AUAAAcuCCagGCCUAugaTsT | 1286 | AD-15121 |
| 3531-3549 | UfCfAUfAGGCfCfUfGGAGUfUfUfAUfTsT | 1287 | AUAAAcuCCagGCCUAugaTsT | 1288 | AD-15131 |
| 3531-3549 | UcAuAgGcCuGgAgUuUaUTsT | 1289 | AUAAAcuCCagGCCUAugaTsT | 1290 | AD-15141 |
| 3557-3575 | UGAAGAUAUUUAUUCUGGGTsT | 1291 | CCCAGAAUAAAUAUCUUCATsT | 1292 | AD-9626 |
| 3557-3575 | uGAAGAuAuuuAuucuGGGTsT | 1293 | CCcAGAAuAAAuAUCUUcATsT | 1294 | AD-9752 |
| 3570-3588 | UCUGGGUUUUGUAGCAUUUTsT | 1295 | AAAUGCUACAAAACCCAGATsT | 1296 | AD-9629 |
| 3570-3588 | ucuGGGuuuuGuAGcAuuuTsT | 1297 | AAAUGCuAcAAAACCcAGATsT | 1298 | AD-9755 |
| 3613-3631 | AUAAAAACAAACAAACGUUTT | 1299 | AACGUUUGUUUGUUUUUAUTT | 1300 | AD-15412 |
| 3617-3635 | AAACAAACAAACGUUGUCCTT | 1301 | GGACAACGUUUGUUUGUUUTT | 1302 | AD-15211 |
| 3618-3636 | AACAAACAAACGUUGUCCUTT | 1303 | AGGACAACGUUUGUUUGUUTT | 1304 | AD-15300 |

¹U, C, A, G: corresponding ribonucleotide; T: deoxythymidine; u, c, a, g: corresponding 2′-O-methyl ribonucleotide; Uf, Cf, Af, Gf: corresponding 2′-deoxy-2′-fluoro ribonucleotide; where nucleotides are written in sequence, they are connected by 3′-5′ phosphodiester groups; nucleotides with interjected “s” are connected by 3′-O-5′-O phosphorothiodiester groups; unless denoted by prefix “p-”, oligonucleotides are devoid of a 5′-phosphate group on the 5′-most nucleotide; all oligonucleotides bear 3′-OH on the 3′-most nucleotide

TABLE 1
data

| | | | | | | IC50 in |
|---|---|---|---|---|---|---|
| | Mean percent remaining mRNA transcript | | | | | Cynomolgous |
| | at siRNA concentration/in cell type | | | | IC50 in | monkey |
| | 100 nM/ | 30 nM/ | 3 nM/ | 30 nM/ | HepG2 | Hepatocyte |
| Duplex name | HepG2 | HepG2 | HepG2 | Hela | [nM] | [nM]s |
| AD-15220 | | | | 35 | | |
| AD-15275 | | | | 56 | | |
| AD-15301 | | | | 70 | | |
| AD-15276 | | | | 42 | | |
| AD-15302 | | | | 32 | | |
| AD-15303 | | | | 37 | | |
| AD-15221 | | | | 30 | | |
| AD-15413 | | | | 61 | | |
| AD-15304 | | | | 70 | | |
| AD-15305 | | | | 36 | | |
| AD-15306 | | | | 20 | | |
| AD-15307 | | | | 38 | | |
| AD-15277 | | | | 50 | | |
| AD-9526 | 74 | 89 | | | | |
| AD-9652 | | 97 | | | | |
| AD-9519 | | 78 | | | | |
| AD-9645 | | 66 | | | | |
| AD-9523 | | 55 | | | | |
| AD-9649 | | 60 | | | | |
| AD-9569 | | 112 | | | | |
| AD-9695 | | 102 | | | | |
| AD-15222 | | | | 75 | | |
| AD-15278 | | | | 78 | | |
| AD-15178 | | | | 83 | | |
| AD-15308 | | | | 84 | | |
| AD-15223 | | | | 67 | | |
| AD-15309 | | | | 34 | | |
| AD-15279 | | | | 44 | | |
| AD-15194 | | | | 63 | | |
| AD-15310 | | | | 42 | | |
| AD-15311 | | | | 30 | | |
| AD-15392 | | | | 18 | | |
| AD-15312 | | | | 21 | | |
| AD-15313 | | | | 19 | | |
| AD-15280 | | | | 81 | | |
| AD-15267 | | | | 82 | | |
| AD-15314 | | | | 32 | | |
| AD-15315 | | | | 74 | | |
| AD-9624 | | 94 | | | | |
| AD-9750 | | 96 | | | | |
| AD-9623 | 43 | 66 | | | | |
| AD-9749 | | 105 | | | | |
| AD-15384 | | | | 48 | | |
| AD-9607 | | 32 | 28 | | 0.20 | |
| AD-9733 | | 78 | 73 | | | |
| AD-9524 | | 23 | 28 | | 0.07 | |
| AD-9650 | | 91 | 90 | | | |
| AD-9520 | | 23 | 32 | | | |
| AD-9520 | | 23 | | | | |
| AD-9646 | | 97 | 108 | | | |
| AD-9608 | | 37 | | | | |
| AD-9734 | | 91 | | | | |
| AD-9546 | | 32 | | | | |
| AD-9672 | | 57 | | | | |
| AD-15385 | | | | 54 | | |
| AD-15393 | | | | 31 | | |
| AD-15316 | | | | 37 | | |
| AD-15317 | | | | 37 | | |
| AD-15318 | | | | 63 | | |
| AD-15195 | | | | 45 | | |
| AD-15224 | | | | 57 | | |
| AD-15188 | | | | 42 | | |
| AD-15225 | | | | 51 | | |
| AD-15281 | | | | 89 | | |
| AD-15282 | | | | 75 | | |
| AD-15319 | | | | 61 | | |
| AD-15226 | | | | 56 | | |
| AD-15271 | | | | 25 | | |
| AD-15283 | | | | 25 | | |
| AD-15284 | | | | 64 | | |
| AD-15189 | | | | 17 | | |
| AD-15227 | | | | 62 | | |
| AD-9547 | | 31 | 29 | | 0.20 | |
| AD-9673 | | 56 | 57 | | | |
| AD-9548 | | 54 | 60 | | | |
| AD-9674 | | 36 | 57 | | | |
| AD-9529 | | 60 | | | | |
| AD-9655 | | 140 | | | | |
| AD-9605 | | 27 | 31 | | 0.27 | |
| AD-9731 | | 31 | 31 | | 0.32 | |
| AD-9596 | | 37 | | | | |
| AD-9722 | | 76 | | | | |
| AD-9583 | | 42 | | | | |
| AD-9709 | | 104 | | | | |
| AD-9579 | | 113 | | | | |
| AD-9705 | | 81 | | | | |
| AD-15394 | | | | 32 | | |
| AD-15196 | | | | 72 | | |
| AD-15197 | | | | 85 | | |
| AD-15198 | | | | 71 | | |
| AD-9609 | 66 | 71 | | | | |
| AD-9735 | | 115 | | | | |
| AD-9537 | | 145 | | | | |
| AD-9663 | | 102 | | | | |
| AD-9528 | | 113 | | | | |
| AD-9654 | | 107 | | | | |
| AD-9515 | | 49 | | | | |
| AD-9641 | | 92 | | | | |
| AD-9514 | | 57 | | | | |
| AD-9640 | | 89 | | | | |
| AD-9530 | | 75 | | | | |
| AD-9656 | | 77 | | | | |
| AD-9538 | 79 | 80 | | | | |
| AD-9664 | | 53 | | | | |
| AD-9598 | 69 | 83 | | | | |
| AD-9724 | | 127 | | | | |
| AD-9625 | 58 | 88 | | | | |
| AD-9751 | | 60 | | | | |
| AD-9556 | | 46 | | | | |
| AD-9682 | | 38 | | | | |
| AD-9539 | 56 | 63 | | | | |
| AD-9665 | | 83 | | | | |
| AD-9517 | | 36 | | | | |
| AD-9643 | | 40 | | | | |
| AD-9610 | | 36 | 34 | | 0.04 | |
| AD-9736 | | 22 | 29 | | 0.04 | |
| AD-14681 | | | | 33 | | |
| AD-14691 | | | | 27 | | |
| AD-14701 | | | | 32 | | |
| AD-14711 | | | | 33 | | |
| AD-14721 | | | | 22 | | |
| AD-14731 | | | | 21 | | |
| AD-14741 | | | | 22 | | |
| AD-15087 | | | | 37 | | |
| AD-15097 | | | | 51 | | |
| AD-15107 | | | | 26 | | |
| AD-15117 | | | | 28 | | |
| AD-15127 | | | | 33 | | |
| AD-15137 | | | | 54 | | |
| AD-15147 | | | | 52 | | |
| AD-9516 | | 94 | | | | |
| AD-9642 | | 105 | | | | |
| AD-9562 | | 46 | 51 | | | |
| AD-9688 | | 26 | 34 | | 4.20 | |
| AD-14677 | | | | 38 | | |
| AD-14687 | | | | 52 | | |
| AD-14697 | | | | 35 | | |
| AD-14707 | | | | 58 | | |
| AD-14717 | | | | 42 | | |
| AD-14727 | | | | 50 | | |
| AD-14737 | | | | 32 | | |
| AD-15083 | | | | 16 | | |
| AD-15093 | | | | 24 | | |
| AD-15103 | | | | 11 | | |
| AD-15113 | | | | 34 | | |
| AD-15123 | | | | 19 | | |
| AD-15133 | | | | 15 | | |
| AD-15143 | | | | 16 | | |
| AD-9521 | | 50 | | | | |
| AD-9647 | | 62 | | | | |
| AD-9611 | | 48 | | | | |
| AD-9737 | | 68 | | | | |
| AD-9592 | 46 | 55 | | | | |
| AD-9718 | | 78 | | | | |
| AD-9561 | | 64 | | | | |
| AD-9687 | | 84 | | | | |
| AD-9636 | | 42 | 41 | | 2.10 | |
| AD-9762 | | 9 | 28 | | 0.40 | |
| AD-9540 | | 45 | | | | |
| AD-9666 | | 81 | | | | |
| AD-9535 | 48 | 73 | | | | |
| AD-9661 | | 83 | | | | |
| AD-9559 | | 35 | | | | |
| AD-9685 | | 77 | | | | |
| AD-9533 | | 100 | | | | |
| AD-9659 | | 88 | | | | |
| AD-9612 | | 122 | | | | |
| AD-9738 | | 83 | | | | |
| AD-9557 | 75 | 96 | | | | |
| AD-9683 | | 48 | | | | |
| AD-9531 | | 31 | 32 | | 0.53 | |
| AD-9657 | | 23 | 29 | | 0.66 | |
| AD-14673 | | | | 81 | | |
| AD-14683 | | | | 56 | | |
| AD-14693 | | | | 56 | | |
| AD-14703 | | | | 68 | | |
| AD-14713 | | | | 55 | | |
| AD-14723 | | | | 24 | | |
| AD-14733 | | | | 34 | | |
| AD-15079 | | | | 85 | | |
| AD-15089 | | | | 54 | | |
| AD-15099 | | | | 70 | | |
| AD-15109 | | | | 67 | | |
| AD-15119 | | | | 67 | | |
| AD-15129 | | | | 57 | | |
| AD-15139 | | | | 69 | | |
| AD-9542 | | 160 | | | | |
| AD-9668 | | 92 | | | | |
| AD-9739 | | 109 | | | | |
| AD-9637 | 56 | 83 | | | | |
| AD-9763 | | 79 | | | | |
| AD-9630 | | 82 | | | | |
| AD-9756 | | 63 | | | | |
| AD-9593 | | 55 | | | | |
| AD-9719 | | 115 | | | | |
| AD-9601 | | 111 | | | | |
| AD-9727 | | 118 | | | | |
| AD-9573 | | 36 | 42 | | 1.60 | |
| AD-9699 | | 32 | 36 | | 2.50 | |
| AD-15228 | | | | 26 | | |
| AD-15395 | | | | 53 | | |
| AD-9602 | | 126 | | | | |
| AD-9728 | | 94 | | | | |
| AD-15386 | | | | 45 | | |
| AD-9580 | | 112 | | | | |
| AD-9706 | | 86 | | | | |
| AD-9581 | | 35 | | | | |
| AD-9707 | | 81 | | | | |
| AD-9543 | | 51 | | | | |
| AD-9669 | | 97 | | | | |
| AD-9574 | | 74 | | | | |
| AD-9700 | | | | | | |
| AD-15320 | | | | 26 | | |
| AD-15321 | | | | 34 | | |
| AD-15199 | | | | 64 | | |
| AD-15167 | | | | 86 | | |
| AD-15164 | | | | 41 | | |
| AD-15166 | | | | 43 | | |
| AD-15322 | | | | 64 | | |
| AD-15200 | | | | 46 | | |
| AD-15213 | | | | 27 | | |
| AD-15229 | | | | 44 | | |
| AD-15215 | | | | 49 | | |
| AD-15214 | | | | 101 | | |
| AD-9315 | | 15 | 32 | | 0.98 | |
| AD-9326 | | 35 | 51 | | | |
| AD-9318 | | 14 | 37 | | 0.40 | |
| AD-9323 | | 14 | 33 | | | |
| AD-9314 | | 11 | 22 | | 0.04 | |
| AD-10792 | | | | | 0.10 | 0.10 |
| AD-10796 | | | | | 0.1 | 0.1 |
| AD-9638 | | 101 | | | | |
| AD-9764 | | 112 | | | | |
| AD-9525 | | 53 | | | | |
| AD-9651 | | 58 | | | | |
| AD-9560 | | 97 | | | | |
| AD-9686 | | 111 | | | | |
| AD-9536 | | 157 | | | | |
| AD-9662 | | 81 | | | | |
| AD-9584 | 52 | 68 | | | | |
| AD-9710 | | 111 | | | | |
| AD-15323 | | | | 62 | | |
| AD-9551 | | 91 | | | | |
| AD-9677 | | 62 | | | | |
| AD-15230 | | | | 52 | | |
| AD-15231 | | | | 25 | | |
| AD-15285 | | | | 36 | | |
| AD-15396 | | | | 27 | | |
| AD-15397 | | | | 56 | | |
| AD-9600 | | 112 | | | | |
| AD-9726 | | 95 | | | | |
| AD-9606 | | 107 | | | | |
| AD-9732 | | 105 | | | | |
| AD-9633 | 56 | 75 | | | | |
| AD-9759 | | 111 | | | | |
| AD-9588 | | 66 | | | | |
| AD-9714 | | 106 | | | | |
| AD-9589 | 67 | 85 | | | | |
| AD-9715 | | 113 | | | | |
| AD-9575 | | 120 | | | | |
| AD-9701 | | 100 | | | | |
| AD-9563 | | 103 | | | | |
| AD-9689 | | 81 | | | | |
| AD-9594 | 80 | 95 | | | | |
| AD-9720 | | 92 | | | | |
| AD-9585 | | 83 | | | | |
| AD-9711 | | 122 | | | | |
| AD-9614 | | 100 | | | | |
| AD-9740 | | 198 | | | | |
| AD-9615 | | 116 | | | | |
| AD-9741 | | 130 | | | | |
| AD-9534 | | 32 | 30 | | | |
| AD-9534 | | 32 | | | | |
| AD-9660 | | 89 | 79 | | | |
| AD-15324 | | | | 46 | | |
| AD-15232 | | | | 19 | | |
| AD-15233 | | | | 25 | | |
| AD-15234 | | | | 59 | | |
| AD-15286 | | | | 109 | | |
| AD-9590 | | 122 | | | | |
| AD-9716 | | 114 | | | | |
| AD-9632 | | 34 | | | | |
| AD-9758 | | 96 | | | | |
| AD-9567 | | 41 | | | | |
| AD-9693 | | 50 | | | | |
| AD-9586 | 81 | 104 | | | | |
| AD-9712 | | 107 | | | | |
| AD-9564 | | 120 | | | | |
| AD-9690 | | 92 | | | | |
| AD-9616 | 74 | 84 | | | | |
| AD-9742 | | 127 | | | | |
| AD-15398 | | | | 24 | | |
| AD-9617 | | 111 | | | | |
| AD-9743 | | 104 | | | | |
| AD-9635 | 73 | 90 | | | | |
| AD-9761 | | 83 | | | | |
| AD-9568 | | 76 | | | | |
| AD-9694 | | 52 | | | | |
| AD-9576 | | 47 | | | | |
| AD-9702 | | 79 | | | | |
| AD-9627 | | 69 | | | | |
| AD-9753 | | 127 | | | | |
| AD-9628 | | 141 | | | | |
| AD-9754 | | 89 | | | | |
| AD-9631 | | 80 | | | | |
| AD-9757 | | 78 | | | | |
| AD-9595 | | 31 | 32 | | | |
| AD-9721 | | 87 | 70 | | | |
| AD-9544 | | 68 | | | | |
| AD-9670 | | 67 | | | | |
| AD-15235 | | | | 25 | | |
| AD-15236 | | | | 73 | | |
| AD-15168 | | | | 100 | | |
| AD-15174 | | | | 92 | | |
| AD-15325 | | | | 81 | | |
| AD-15326 | | | | 65 | | |
| AD-9570 | 35 | 42 | | | | |
| AD-9696 | | 77 | | | | |
| AD-9566 | | 38 | | | | |
| AD-9692 | | 78 | | | | |
| AD-9532 | | 100 | | | | |
| AD-9658 | | 102 | | | | |
| AD-9549 | | 50 | | | | |
| AD-9675 | | 78 | | | | |
| AD-9541 | | 43 | | | | |
| AD-9667 | | 73 | | | | |
| AD-9550 | | 36 | | | | |
| AD-9676 | | 100 | | | | |
| AD-9571 | | 27 | 32 | | | |
| AD-9697 | | 74 | 89 | | | |
| AD-9572 | 47 | 53 | | | | |
| AD-9698 | | 73 | | | | |
| AD-15327 | | | | 82 | | |
| AD-9639 | | 30 | 35 | | | |
| AD-9765 | | 82 | 74 | | | |
| AD-9518 | | 31 | 35 | | 0.60 | |
| AD-9518 | | 31 | | | | |
| AD-9644 | | 35 | 37 | | 2.60 | |
| AD-14672 | | | | 26 | | |
| AD-14682 | | | | 27 | | |
| AD-14692 | | | | 22 | | |
| AD-14702 | | | | 19 | | |
| AD-14712 | | | | 25 | | |
| AD-14722 | | | | 18 | | |
| AD-14732 | | | | 32 | | |
| AD-15078 | | | | 86 | | |
| AD-15088 | | | | 97 | | |
| AD-15098 | | | | 74 | | |
| AD-15108 | | | | 67 | | |
| AD-15118 | | | | 76 | | |
| AD-15128 | | | | 86 | | |
| AD-15138 | | | | 74 | | |
| AD-15237 | | | | 30 | | |
| AD-15287 | | | | 30 | | |
| AD-15238 | | | | 36 | | |
| AD-15328 | | | | 35 | | |
| AD-15399 | | | | 47 | | |
| AD-9582 | | 37 | | | | |
| AD-9708 | | 81 | | | | |
| AD-9545 | | 31 | 43 | | | |
| AD-9671 | | 15 | 33 | | 2.50 | |
| AD-14674 | | | | 16 | | |
| AD-14684 | | | | 26 | | |
| AD-14694 | | | | 18 | | |
| AD-14704 | | | | 27 | | |
| AD-14714 | | | | 20 | | |
| AD-14724 | | | | 18 | | |
| AD-14734 | | | | 18 | | |
| AD-15080 | | | | 29 | | |
| AD-15090 | | | | 23 | | |
| AD-15100 | | | | 26 | | |
| AD-15110 | | | | 23 | | |
| AD-15120 | | | | 20 | | |
| AD-15130 | | | | 20 | | |
| AD-15140 | | | | 19 | | |
| AD-9522 | | 59 | | | | |
| AD-9648 | | 78 | | | | |
| AD-9552 | | 80 | | | | |
| AD-9678 | | 76 | | | | |
| AD-9618 | | 90 | | | | |
| AD-9744 | | 91 | | | | |
| AD-15239 | | | | 38 | | |
| AD-15212 | | | | 19 | | |
| AD-15240 | | | | 43 | | |
| AD-15177 | | | | 59 | | |
| AD-15179 | | | | 13 | | |
| AD-15180 | | | | 15 | | |
| AD-15241 | | | | 14 | | |
| AD-15268 | | | | 42 | | |
| AD-15242 | | | | 21 | | |
| AD-15216 | | | | 28 | | |
| AD-15176 | | | | 35 | | |
| AD-15181 | | | | 35 | | |
| AD-15243 | | | | 22 | | |
| AD-15182 | | | | 42 | | |
| AD-15244 | | | | 31 | | |
| AD-15387 | | | | 23 | | |
| AD-15245 | | | | 18 | | |
| AD-9555 | | 34 | | | | |
| AD-9681 | | 55 | | | | |
| AD-9619 | 42 | 61 | | | | |
| AD-9745 | | 56 | | | | |
| AD-9620 | 44 | 77 | | | | |
| AD-9746 | | 89 | | | | |
| AD-15288 | | | | 19 | | |
| AD-15246 | | | | 16 | | |
| AD-15289 | | | | 37 | | |
| AD-9324 | | 59 | 67 | | | |
| AD-15329 | | | | 103 | | |
| AD-15330 | | | | 62 | | |
| AD-15169 | | | | 22 | | |
| AD-15201 | | | | 6 | | |
| AD-15331 | | | | 14 | | |
| AD-15190 | | | | 47 | | |
| AD-15247 | | | | 61 | | |
| AD-15248 | | | | 22 | | |
| AD-15175 | | | | 45 | | |
| AD-15249 | | | | 51 | | |
| AD-15250 | | | | 96 | | |
| AD-15400 | | | | 12 | | |
| AD-15332 | | | | 22 | | |
| AD-15388 | | | | 30 | | |
| AD-15333 | | | | 20 | | |
| AD-15334 | | | | 96 | | |
| AD-15335 | | | | 75 | | |
| AD-15183 | | | | 16 | | |
| AD-15202 | | | | 41 | | |
| AD-15203 | | | | 39 | | |
| AD-15272 | | | | 49 | | |
| AD-15217 | | | | 16 | | |
| AD-15290 | | | | 15 | | |
| AD-15218 | | | | 13 | | |
| AD-15389 | | | | 13 | | |
| AD-15336 | | | | 40 | | |
| AD-15337 | | | | 19 | | |
| AD-15191 | | | | 33 | | |
| AD-15390 | | | | 25 | | |
| AD-15338 | | | | 9 | | |
| AD-15204 | | | | 33 | | |
| AD-15251 | | | | 76 | | |
| AD-15205 | | | | 14 | | |
| AD-15171 | | | | 16 | | |
| AD-15252 | | | | 58 | | |
| AD-15339 | | | | 20 | | |
| AD-15253 | | | | 15 | | |
| AD-15340 | | | | 18 | | |
| AD-15291 | | | | 17 | | |
| AD-15341 | | | | 11 | | |
| AD-15401 | | | | 13 | | |
| AD-15342 | | | | 30 | | |
| AD-15343 | | | | 21 | | |
| AD-15292 | | | | 16 | | |
| AD-15344 | | | | 20 | | |
| AD-15254 | | | | 18 | | |
| AD-15345 | | | | 18 | | |
| AD-15206 | | | | 15 | | |
| AD-15346 | | | | 16 | | |
| AD-15347 | | | | 62 | | |
| AD-9577 | | 33 | 31 | | | |
| AD-9703 | | 17 | 26 | | | |
| AD-14678 | | | | 22 | | |
| AD-14688 | | | | 23 | | |
| AD-14698 | | | | 23 | | |
| AD-14708 | | | | 14 | | |
| AD-14718 | | | | 31 | | |
| AD-14728 | | | | 25 | | |
| AD-14738 | | | | 31 | | |
| AD-15084 | | | | 19 | | |
| AD-15094 | | | | 11 | | |
| AD-15104 | | | | 16 | | |
| AD-15114 | | | | 15 | | |
| AD-15124 | | | | 11 | | |
| AD-15134 | | | | 12 | | |
| AD-15144 | | | | 9 | | |
| AD-15391 | | | | 7 | | |
| AD-15348 | | | | 13 | | |
| AD-15349 | | | | 8 | | |
| AD-15170 | | | | 40 | | |
| AD-15350 | | | | 14 | | |
| AD-15402 | | | | 27 | | |
| AD-15293 | | | | 27 | | |
| AD-15351 | | | | 14 | | |
| AD-15403 | | | | 11 | | |
| AD-15404 | | | | 38 | | |
| AD-15207 | | | | 15 | | |
| AD-15352 | | | | 23 | | |
| AD-15255 | | | | 31 | | |
| AD-9603 | | 123 | | | | |
| AD-9729 | | 56 | | | | |
| AD-9599 | | 139 | | | | |
| AD-9725 | | 38 | | | | |
| AD-9621 | | 77 | | | | |
| AD-9747 | | 63 | | | | |
| AD-15405 | | | | 32 | | |
| AD-15353 | | | | 39 | | |
| AD-15354 | | | | 49 | | |
| AD-15406 | | | | 35 | | |
| AD-15407 | | | | 39 | | |
| AD-15355 | | | | 18 | | |
| AD-15356 | | | | 50 | | |
| AD-15357 | | | | 54 | | |
| AD-15269 | | | | 23 | | |
| AD-9565 | | 74 | | | | |
| AD-9691 | | 49 | | | | |
| AD-15358 | | | | 12 | | |
| AD-15359 | | | | 24 | | |
| AD-15360 | | | | 13 | | |
| AD-15219 | | | | 19 | | |
| AD-15361 | | | | 24 | | |
| AD-15273 | | | | 36 | | |
| AD-15362 | | | | 31 | | |
| AD-15192 | | | | 20 | | |
| AD-15256 | | | | 19 | | |
| AD-15363 | | | | 33 | | |
| AD-15364 | | | | 24 | | |
| AD-9604 | 35 | 49 | | | | |
| AD-9730 | | 85 | | | | |
| AD-9527 | | 45 | | | | |
| AD-9653 | | 86 | | | | |
| AD-15365 | | | | 62 | | |
| AD-15294 | | | | 30 | | |
| AD-15173 | | | | 12 | | |
| AD-15366 | | | | 21 | | |
| AD-15367 | | | | 11 | | |
| AD-15257 | | | | 18 | | |
| AD-15184 | | | | 50 | | |
| AD-15185 | | | | 12 | | |
| AD-15258 | | | | 73 | | |
| AD-15186 | | | | 36 | | |
| AD-15274 | | | | 19 | | |
| AD-15368 | | | | 7 | | |
| AD-15369 | | | | 17 | | |
| AD-15370 | | | | 19 | | |
| AD-15259 | | | | 38 | | |
| AD-15408 | | | | 52 | | |
| AD-9597 | | 23 | 21 | | 0.04 | |
| AD-9723 | | 12 | 26 | | | |
| AD-14680 | | | | 15 | | |
| AD-14690 | | | | 18 | | |
| AD-14700 | | | | 15 | | |
| AD-14710 | | | | 15 | | |
| AD-14720 | | | | 18 | | |
| AD-14730 | | | | 18 | | |
| AD-14740 | | | | 17 | | |
| AD-15086 | | | | 85 | | |
| AD-15096 | | | | 70 | | |
| AD-15106 | | | | 71 | | |
| AD-15116 | | | | 73 | | |
| AD-15126 | | | | 71 | | |
| AD-15136 | | | | 56 | | |
| AD-15146 | | | | 72 | | |
| AD-15260 | | | | 79 | | |
| AD-15371 | | | | 24 | | |
| AD-15372 | | | | 52 | | |
| AD-15172 | | | | 27 | | |
| AD-15295 | | | | 22 | | |
| AD-15373 | | | | 11 | | |
| AD-15163 | | | | 18 | | |
| AD-15165 | | | | 13 | | |
| AD-15374 | | | | 23 | | |
| AD-15296 | | | | 13 | | |
| AD-15261 | | | | 20 | | |
| AD-15375 | | | | 90 | | |
| AD-15262 | | | | 72 | | |
| AD-15376 | | | | 14 | | |
| AD-15377 | | | | 19 | | |
| AD-15409 | | | | 17 | | |
| AD-15378 | | | | 18 | | |
| AD-15410 | | | | 8 | | |
| AD-15379 | | | | 11 | | |
| AD-15187 | | | | 36 | | |
| AD-15263 | | | | 18 | | |
| AD-15264 | | | | 75 | | |
| AD-15297 | | | | 21 | | |
| AD-15208 | | | | 6 | | |
| AD-15209 | | | | 28 | | |
| AD-15193 | | | | 131 | | |
| AD-15380 | | | | 88 | | |
| AD-15298 | | | | 43 | | |
| AD-15299 | | | | 99 | | |
| AD-15265 | | | | 95 | | |
| AD-15381 | | | | 18 | | |
| AD-15210 | | | | 40 | | |
| AD-15270 | | | | 83 | | |
| AD-9591 | 75 | 95 | | | | |
| AD-9717 | | 105 | | | | |
| AD-9622 | | 94 | | | | |
| AD-9748 | | 103 | | | | |
| AD-9587 | | 63 | 49 | | | |
| AD-9713 | | 22 | 25 | | | |
| AD-14679 | | | | 19 | | |
| AD-14689 | | | | 24 | | |
| AD-14699 | | | | 19 | | |
| AD-14709 | | | | 21 | | |
| AD-14719 | | | | 24 | | |
| AD-14729 | | | | 23 | | |
| AD-14739 | | | | 24 | | |
| AD-15085 | | | | 74 | | |
| AD-15095 | | | | 60 | | |
| AD-15105 | | | | 33 | | |
| AD-15115 | | | | 30 | | |
| AD-15125 | | | | 54 | | |
| AD-15135 | | | | 51 | | |
| AD-15145 | | | | 49 | | |
| AD-9578 | 49 | 61 | | | | |
| AD-9704 | | 111 | | | | |
| AD-9558 | | 66 | | | | |
| AD-9684 | | 63 | | | | |
| AD-9634 | | 29 | 30 | | | |
| AD-9760 | | 14 | 27 | | | |
| AD-15411 | | | | 5 | | |
| AD-15266 | | | | 23 | | |
| AD-15382 | | | | 12 | | |
| AD-9554 | | 23 | 24 | | | |
| AD-9680 | | 12 | 22 | | 0.10 | 0.10 |
| AD-14676 | | | | 12 | | |
| AD-14686 | | | | 13 | | |
| AD-14696 | | | | 12 | | |
| AD-14706 | | | | 18 | | |
| AD-14716 | | | | 17 | | |
| AD-14726 | | | | 16 | | |
| AD-14736 | | | | 9 | | |
| AD-15082 | | | | 27 | | |
| AD-15092 | | | | 28 | | |
| AD-15102 | | | | 19 | | |
| AD-15112 | | | | 17 | | |
| AD-15122 | | | | 56 | | |
| AD-15132 | | | | 39 | | |
| AD-15142 | | | | 46 | | |
| AD-9553 | | 27 | 22 | | 0.02 | |
| AD-9679 | | 17 | 21 | | | |
| AD-14675 | | | | 11 | | |
| AD-14685 | | | | 19 | | |
| AD-14695 | | | | 12 | | |
| AD-14705 | | | | 16 | | |
| AD-14715 | | | | 19 | | |
| AD-14725 | | | | 19 | | |
| AD-14735 | | | | 19 | | |
| AD-15081 | | | | 30 | | |
| AD-15091 | | | | 16 | | |
| AD-15101 | | | | 16 | | |
| AD-15111 | | | | 11 | | |
| AD-15121 | | | | 19 | | |
| AD-15131 | | | | 17 | | |
| AD-15141 | | | | 18 | | |
| AD-9626 | | 97 | 68 | | | |
| AD-9752 | | 28 | 33 | | | |
| AD-9629 | | 23 | 24 | | | |
| AD-9755 | | 28 | 29 | | | |
| AD-15412 | | | | 21 | | |
| AD-15211 | | | | 73 | | |
| AD-15300 | | | | 41 | | |

TABLE 2

| | | SEQ | | SEQ |
|---|---|---|---|---|
| Duplex | | ID | | ID |
| number | Sense stmnd sequence (5′-3′)¹ | NO: | Antisense-strand sequence (5′-3′)¹ | NO: |
| AD-10792 | GccuGGAGuuuAuucGGAATsT | 1305 | UUCCGAAuAAACUCcAGGCTsT | 1306 |
| AD-10793 | GccuGGAGuuuAuucGGAATsT | 1307 | uUcCGAAuAAACUccAGGCTsT | 1308 |
| AD-10796 | GccuGGAGuuuAuucGGAATsT | 1309 | UUCCGAAUAAACUCCAGGCTsT | 1310 |
| AD-12038 | GccuGGAGuuuAuucGGAATsT | 1311 | uUCCGAAUAAACUCCAGGCTsT | 1312 |
| AD-12039 | GccuGGAGuuuAuucGGAATsT | 1313 | UuCCGAAUAAACUCCAGGCTsT | 1314 |
| AD-12040 | GccuGGAGuuuAuucGGAATsT | 1315 | UUcCGAAUAAACUCCAGGCTsT | 1316 |
| AD-12041 | GccuGGAGuuuAuucGGAATsT | 1317 | UUCcGAAUAAACUCCAGGCTsT | 1318 |
| AD-12042 | GCCUGGAGUUUAUUCGGAATsT | 1319 | uUCCGAAUAAACUCCAGGCTsT | 1320 |
| AD-12043 | GCCUGGAGUUUAUUCGGAATsT | 1321 | UuCCGAAUAAACUCCAGGCTsT | 1322 |
| AD-12044 | GCCUGGAGUUUAUUCGGAATsT | 1323 | UUcCGAAUAAACUCCAGGCTsT | 1324 |
| AD-12045 | GCCUGGAGUUUAUUCGGAATsT | 1325 | UUCcGAAUAAACUCCAGGCTsT | 1326 |
| AD-12046 | GccuGGAGuuuAuucGGAA | 1327 | UUCCGAAUAAACUCCAGGCscsu | 1328 |
| AD-12047 | GccuGGAGuuuAuucGGAAA | 1329 | UUUCCGAAUAAACUCCAGGCscsu | 1330 |
| AD-12048 | GccuGGAGuuuAuucGGAAAA | 1331 | UUUUCCGAAUAAACUCCAGGCscsu | 1332 |
| AD-12049 | GccuGGAGuuuAuucGGAAAAG | 1333 | CUUUUCCGAAUAAACUCCAGGCscsu | 1334 |
| AD-12050 | GccuGGAGuuuAuucGGAATTab | 1335 | UUCCGAAUAAACUCCAGGCTTab | 1336 |
| AD-12051 | GccuGGAGuuuAuucGGAAATTab | 1337 | UUUCCGAAuAAACUCCAGGCTTab | 1338 |
| AD-12052 | GccuGGAGuuuAuucGGAAAATTab | 1339 | UUUUCCGAAUAAACUCCAGGCTTab | 1340 |
| AD-12053 | GccuGGAGuuuAuucGGAAAAGTTab | 1341 | CUUUUCCGAAUAAACUCCAGGCTTab | 1342 |
| AD-12054 | GCCUGGAGUUUAUUCGGAATsT | 1343 | UUCCGAAUAAACUCCAGGCscsu | 1344 |
| AD-12055 | GccuGGAGuuuAuucGGAATsT | 1345 | UUCCGAAUAAACUCCAGGCscsu | 1346 |
| AD-12056 | GcCuGgAgUuUaUuCgGaA | 1347 | UUCCGAAUAAACUCCAGGCTTab | 1348 |
| AD-12057 | GcCuGgAgUuUaUuCgGaA | 1349 | UUCCGAAUAAACUCCAGGCTsT | 1350 |
| AD-12058 | GcCuGgAgUuUaUuCgGaA | 1351 | UUCCGAAuAAACUCcAGGCTsT | 1352 |
| AD-12059 | GcCuGgAgUuUaUuCgGaA | 1353 | uUcCGAAuAAACUccAGGCTsT | 1354 |
| AD-12060 | GcCuGgAgUuUaUuCgGaA | 1355 | UUCCGaaUAaaCUCCAggc | 1356 |
| AD-12061 | GcCuGgAgUuUaUuCgGaATsT | 1357 | UUCCGaaUAaaCUCCAggcTsT | 1358 |
| AD-12062 | GcCuGgAgUuUaUuCgGaATTab | 1359 | UUCCGaaUAaaCUCCAggcTTab | 1360 |
| AD-12063 | GcCuGgAgUuUaUuCgGaA | 1361 | UUCCGaaUAaaCUCCAggcscsu | 1362 |
| AD-12064 | GcCuGgAgUuUaUuCgGaATsT | 1363 | UUCCGAAuAAACUCcAGGCTsT | 1364 |
| AD-12065 | GcCuGgAgUuUaUuCgGaATTab | 1365 | UUCCGAAuAAACUCcAGGCTTab | 1366 |
| AD-12066 | GcCuGgAgUuUaUuCgGaA | 1367 | UUCCGAAuAAACUCcAGGCscsu | 1368 |
| AD-12067 | GcCuGgAgUuUaUuCgGaATsT | 1369 | UUCCGAAUAAACUCCAGGCTsT | 1370 |
| AD-12068 | GcCuGgAgUuUaUuCgGaATTab | 1371 | UUCCGAAUAAACUCCAGGCTTab | 1372 |
| AD-12069 | GcCuGgAgUuUaUuCgGaA | 1373 | UUCCGAAUAAACUCCAGGCscsu | 1374 |
| AD-12338 | GfcCfuGfgAfgUfuUfaUfuCfgGfaAf | 1375 | P-uUfcCfgAfaUfaAfaCfuCfcAfgGfc | 1376 |
| AD-12339 | GcCuGgAgUuUaUuCgGaA | 1377 | P-uUfcCfgAfaUfaAfaCfuCfcAfgGfc | 1378 |
| AD-12340 | GccuGGAGuuuAuucGGAA | 1379 | P-uUfcCfgAfaUfaAfaCfuCfcAfgGfc | 1380 |
| AD-12341 | GfcCfuGfgAfgUfuUfaUfuCfgGfaAffsT | 1381 | P-uUfcCfgAfaUfaAfaCfuCfcAfgGfcTsT | 1382 |
| AD-12342 | GfcCfuGfgAfgUfuUfaUfuCfgGfaAffsT | 1383 | UUCCGAAuAAACUCcAGGCTsT | 1384 |
| AD-12343 | GfcCfuGfgAfgUfuUfaUfuCfgGfaAffsT | 1385 | uUcCGAAuAAACUccAGGCTsT | 1386 |
| AD-12344 | GfcCfuGfgAfgUfuUfaUfuCfgGfaAffsT | 1387 | UUCCGAAUAAACUCCAGGCTsT | 1388 |
| AD-12345 | GfcCfuGfgAfgUfuUfaUfuCfgGfaAffsT | 1389 | UUCCGAAUAAACUCCAGGCscsu | 1390 |
| AD-12346 | GfcCfuGfgAfgUfuUfaUfuCfgGfaAffsT | 1391 | UUCCGaaUAaaCUCCAggcscsu | 1392 |
| AD-12347 | GCCUGGAGUUUAUUCGGAATsT | 1393 | P-uUfcCfgAfaUfaAfaCfuCfcAfgGfcTsT | 1394 |
| AD-12348 | GccuGGAGuuuAuucGGAATsT | 1395 | P-uUfcCfgAfaUfaAfaCfuCfcAfgGfcTsT | 1396 |
| AD-12349 | GcCuGgAgUuUaUuCgGaATsT | 1397 | P-uUfcCfgAfaUfaAfaCfuCfcAfgGfcTsT | 1398 |
| AD-12350 | GfcCfuGfgAfgUfuUfaUfuCfgGfaAfTTab | 1399 | P-uUfcCfgAfaUfaAfaCfuCfcAfgGfcTTab | 1400 |
| AD-12351 | GfcCfuGfgAfgUfuUfaUfuCfgGfaAf | 1401 | P-uUfcCfgAfaUfaAfaCfuCfcAfgGfcsCfsu | 1402 |
| AD-12352 | GfcCfuGfgAfgUfuUfaUfuCfgGfaAf | 1403 | UUCCGaaUAaaCUCCAggcscsu | 1404 |
| AD-12354 | GfcCfuGfgAfgUfuUfaUfuCfgGfaAf | 1405 | UUCCGAAUAAACUCCAGGCscsu | 1406 |
| AD-12355 | GfcCfuGfgAfgUfuUfaUfuCfgGfaAf | 1407 | UUCCGAAuAAACUCcAGGCTsT | 1408 |
| AD-12356 | GfcCfuGfgAfgUfuUfaUfuCfgGfaAf | 1409 | uUcCGAAuAAACUccAGGCTsT | 1410 |
| AD-12357 | GmocCmouGmogAm02gUmouUmoaUmouC | 1411 | UUCCGaaUAaaCUCCAggc | 1412 |
| | mogGmoaA | | | |
| AD-12358 | GmocCmouGmogAm02gUmouUmoaUmouC | 1413 | P-uUfcCfgAfaUfaAfaCfuCfcAfgGfc | 1414 |
| | mogGmoaA | | | |
| AD-12359 | GmocCmouGmogAm02gUmouUmoaUmouC | 1415 | P-uUfcCfgAfaUfaAfaCfuCfcAfgGfcsCfsu | 1416 |
| | mogGmoaA | | | |
| AD-12360 | GmocCmouGmogAm02gUmouUmoaUmouC | 1417 | UUCCGAAUAAACUCCAGGCscsu | 1418 |
| | mogGmoaA | | | |
| AD-12361 | GmocCmouGmogAm02gUmouUmoaUmouC | 1419 | UUCCGAAuAAACUCcAGGCTsT | 1420 |
| | mogGmoaA | | | |
| AD-12362 | GmocCmouGmogAm02gUmouUmoaUmouC | 1421 | uUcCGAAuAAACUccAGGCTsT | 1422 |
| | mogGmoaA | | | |
| AD-12363 | GmocCmouGmogAm02gUmouUmoaUmouC | 1423 | UUCCGaaUAaaCUCCAggcscsu | 1424 |
| | mogGmoaA | | | |
| AD-12364 | GmocCmouGmogAmogUmouUmoaUmouCm | 1425 | UUCCGaaUAaaCUCCAggcTsT | 1426 |
| | ogGmoaATsT | | | |
| AD-12365 | GmocCmouGmogAmogUmouUmoaUmouCm | 1427 | UUCCGAAuAAACUCcAGGCTsT | 1428 |
| | ogGmoaATsT | | | |
| AD-12366 | GmocCmouGmogAmogUmouUmoaUmouCm | 1429 | UUCCGAAUAAACUCCAGGCTsT | 1430 |
| | ogGmoaATsT | | | |
| AD-12367 | GmocmocmouGGAGmoumoumouAmoumou | 1431 | UUCCGaaUAaaCUCCAggcTsT | 1432 |
| | mocGGAATsT | | | |
| AD-12368 | GmocmocmouGGAGmoumoumouAmoumou | 1433 | UUCCGAAuAAACUCcAGGCTsT | 1434 |
| | mocGGAATsT | | | |
| AD-12369 | GmocmocmouGGAGmoumoumouAmoumou | 1435 | UUCCGAAUAAACUCCAGGCTsT | 1436 |
| | mocGGAATsT | | | |
| AD-12370 | GmocmocmouGGAGmoumoumouAmoumou | 1437 | P-UfUfCfCfGAAUfAAACfUfCfCfAGGCfTsT | 1438 |
| | mocGGAATsT | | | |
| AD-12371 | GmocmocmouGGAGmoumoumouAmoumou | 1439 | P-UfUfCfCfGAAUfAAACfUfCfCfAGGCfsCfsUf | 1440 |
| | mocGGAATsT | | | |
| AD-12372 | GmocmocmouGGAGmoumoumouAmoumou | 1441 | P-uUfcCfgAfaUfaAfaCfuCfcAfgGfcsCfsu | 1442 |
| | mocGGAATsT | | | |
| AD-12373 | GmocmocmouGGAGmoumoumouAmoumou | 1443 | UUCCGAAUAAACUCCAGGCTsT | 1444 |
| | mocGGAATsT | | | |
| AD-12374 | GCfCfUfGGAGUfUfUfAUfUfCfGGAATsT | 1445 | UfUfCfCfGAAUfAAACfUfCfCfAGGCfTsT | 1446 |
| AD-12375 | GCfCfUfGGAGUfUfUfAUfUfCfGGAATsT | 1447 | UUCCGAAUAAACUCCAGGCTsT | 1448 |
| AD-12377 | GCfCfUfGGAGUfUfUfAUfUfCfGGAATsT | 1449 | uUcCGAAuAAACUccAGGCTsT | 1450 |
| AD-12378 | GCfCfUfGGAGUfUfUfAUfUfCfGGAATsT | 1451 | UUCCGaaUAaaCUCCAggcscsu | 1452 |
| AD-12379 | GCfCfUfGGAGUfUfUfAUfUfCfGGAATsT | 1453 | UUCCGAAUAAACUCCAGGCscsu | 1454 |
| AD-12380 | GCfCfUfGGAGUfUfUfAUfUfCfGGAATsT | 1455 | P-uUfcCfgAfaUfaAfaCfuCfcAfgGfcsCfsu | 1456 |
| AD-12381 | GCfCfUfGGAGUfUfUfAUfUfCfGGAATsT | 1457 | P-uUfcCfgAfaUfaAfaCfuCfcAfgGfcTsT | 1458 |
| AD-12382 | GCfCfUfGGAGUfUfUfAUfUfCfGGAATsT | 1459 | P-UfUfCfCfGAAUfAAACfUfCfCfAGGCfTsT | 1460 |
| AD-12383 | GCCUGGAGUUUAUUCGGAATsT | 1461 | P-UfUfCfCfGAAUfAAACfUfCfCfAGGCfTsT | 1462 |
| AD-12384 | GccuGGAGuuuAuucGGAATsT | 1463 | P-UfUfCfCfGAAUfAAACfUfCfCfAGGCfTsT | 1464 |
| AD-12385 | GcCuGgAgUuUaUuCgGaATsT | 1465 | P-UfUfCfCfGAAUfAAACfUfCfCfAGGCfTsT | 1466 |
| AD-12386 | GfcCfuGfgAfgUfuUfaUfuCfgGfaAf | 1467 | P-UfUfCfCfGAAUfAAACfUfCfCfAGGCfTsT | 1468 |
| AD-12387 | GCfCfUfGGAGGUfUfUfAUfUfCfGGAA | 1469 | UfUfCfCfGAAUfAAACfUfCfCfAGGCfsCfsUf | 1470 |
| AD-12388 | GCfCfUfGGAGGUfUfUfAUfUfCfGGAA | 1471 | P-uUfcCfgAfaUfaAfaCfuCfcAfgGfc | 1472 |
| AD-12389 | GCfCfUfGGAGGUfUfUfAUfUfCfGGAA | 1473 | P-uUfcCfgAfaUfaAfaCfuCfcAfgGfcsCfsu | 1474 |
| AD-12390 | GCfCfUfGGAGGUfUfUfAUfUfCfGGAA | 1475 | UUCCGAAUAAACUCCAGGCscsu | 1476 |
| AD-12391 | GCfCfUfGGAGGUfUfUfAUfUfCfGGAA | 1477 | UUCCGaaUAaaCUCCAggc | 1478 |
| AD-12392 | GCfCfUfGGAGGUfUfUfAUfUfCfGGAA | 1479 | UUCCGAAUAAACUCCAGGCTsT | 1480 |
| AD-12393 | GCfCfUfGGAGGUfUfUfAUfUfCfGGAA | 1481 | UUCCGAAuAAACUCcAGGCTsT | 1482 |
| AD-12394 | GCfCfUfGGAGGUfUfUfAUfUfCfGGAA | 1483 | uUcCGAAuAAACUccAGGCTsT | 1484 |
| AD-12395 | GmocCmouGmogAmogUmouUmoaUmouCm | 1485 | P-UfUfCfCfGAAUfAAACfUfCfCfAGGCfsCfsUf | 1486 |
| | ogGmoaATsT | | | |
| AD-12396 | GmocCmouGmogAmogUmouUmoaUmouCm | 1487 | P-UfUfCfCfGAAUfAAACfUfCfCfAGGCfsCfsUf | 1488 |
| | ogGmoaA | | | |
| AD-12397 | GfcCfuGfgAfgUfuUfaUfuCfgGfaAf | 1489 | P-UfUfCfCfGAAUfAAACfUfCfCfAGGCfsCfsUf | 1490 |
| AD-12398 | GfcCfuGfgAfgUfuUfaUfuCfgGfaAffsT | 1491 | P-UfUfCfCfGAAUfAAACfUfCfCfAGGCfsCfsUf | 1492 |
| AD-12399 | GcCuGgAgUuUaUuCgGaATsT | 1493 | P-UfUfCfCfGAAUfAAACfUfCfCfAGGCfsCfsUf | 1494 |
| AD-12400 | GCCUGGAGUUUAUUCGGAATsT | 1495 | P-UfUfCfCfGAAUfAAACfUfCfCfAGGCfsCfsUf | 1496 |
| AD-12401 | GccuGGAGuuuAuucGGAATsT | 1497 | P-UfUfCfCfGAAUfAAACfUfCfCfAGGCfsCfsUf | 1498 |
| AD-12402 | GccuGGAGuuuAuucGGAA | 1499 | P-UfUfCfCfGAAUfAAACfUfCfCfAGGCfsCfsUf | 1500 |
| AD-12403 | GCfCfUfGGAGGUfUfUfAUfUfCfGGAA | 1501 | P-UfUfCfCfGAAUfAAACfUfCfCfAGGCfsCfsUf | 1502 |
| AD-9314 | GCCUGGAGUUUAUUCGGAATsT | 1503 | UUCCGAAUAAACUCCAGGCTsT | 1504 |

¹U, C, A, G: corresponding ribonucleotide; T: deoxythymidine; u, c, a, g: corresponding 2′-O-methyl ribonucleotide; Uf, Cf, Af, Gf: corresponding 2′-deoxy-2′-fluoro ribonucleotide; moc, mou, mog, moa: corresponding 2′-MOE nucleotide; where nucleotides are written in sequence, they are connected by 3′-5′ phosphodiester groups; ab: 3′-terminal abasic nucleotide; nucleotides with interjected “s” are connected by 3′-O-5′-O phosphorothiodiester groups; unless denoted by prefix “p-”, oligonucleotides are devoid of a 5′-phosphate group on the 5′-most nucleotide; all oligonucleotides bear 3′-OH on the 3′-most nucleotide

TABLE 2

| | Remaining mRNA | | Remaining mRNA | | Remaining mRNA |
|---|---|---|---|---|---|
| | in % of controls | | in % of controls | | in % of controls |
| Duplex | at siRNA conc. | Duplex | at siRNA conc. | Duplex | at siRNA conc. |
| number | of 30 nM | number | of 30 nM | number | of 30 nM |
| AD-10792 | 15 | AD-12339 | 14 | AD-12377 | 88 |
| AD-10793 | 32 | AD-12340 | 19 | AD-12378 | 6 |
| AD-10796 | 13 | AD-12341 | 12 | AD-12379 | 6 |
| AD-12038 | 13 | AD-12342 | 13 | AD-12380 | 8 |
| AD-12039 | 29 | AD-12343 | 24 | AD-12381 | 10 |
| AD-12040 | 10 | AD-12344 | 9 | AD-12382 | 7 |
| AD-12041 | 11 | AD-12345 | 12 | AD-12383 | 7 |
| AD-12042 | 12 | AD-12346 | 13 | AD-12377 | 88 |
| AD-12043 | 13 | AD-12347 | 11 | AD-12378 | 6 |
| AD-12044 | 7 | AD-12348 | 8 | AD-12379 | 6 |
| AD-12045 | 8 | AD-12349 | 11 | AD-12380 | 8 |
| AD-12046 | 13 | AD-12350 | 17 | AD-12381 | 10 |
| AD-12047 | 17 | AD-12351 | 11 | AD-12382 | 7 |
| AD-12048 | 43 | AD-12352 | 11 | AD-12383 | 7 |
| AD-12049 | 34 | AD-12354 | 11 | AD-12384 | 8 |
| AD-12050 | 16 | AD-12355 | 9 | AD-12385 | 8 |
| AD-12051 | 31 | AD-12356 | 25 | AD-12386 | 11 |
| AD-12052 | 81 | AD-12357 | 56 | AD-12387 | 13 |
| AD-12053 | 46 | AD-12358 | 29 | AD-12388 | 19 |
| AD-12054 | 8 | AD-12359 | 30 | AD-12389 | 16 |
| AD-12055 | 13 | AD-12360 | 15 | AD-12390 | 17 |
| AD-12056 | 11 | AD-12361 | 20 | AD-12391 | 21 |
| AD-12057 | 8 | AD-12362 | 51 | AD-12392 | 28 |
| AD-12058 | 9 | AD-12363 | 11 | AD-12393 | 17 |
| AD-12059 | 23 | AD-12364 | 25 | AD-12394 | 75 |
| AD-12060 | 10 | AD-12365 | 18 | AD-12395 | 55 |
| AD-12061 | 7 | AD-12366 | 23 | AD-12396 | 59 |
| AD-12062 | 10 | AD-12367 | 42 | AD-12397 | 20 |
| AD-12063 | 19 | AD-12368 | 40 | AD-12398 | 11 |
| AD-12064 | 15 | AD-12369 | 26 | AD-12399 | 13 |
| AD-12065 | 16 | AD-12370 | 68 | AD-12400 | 12 |
| AD-12066 | 20 | AD-12371 | 60 | AD-12401 | 13 |
| AD-12067 | 17 | AD-12372 | 60 | AD-12402 | 14 |
| AD-12068 | 18 | AD-12373 | 55 | AD-12403 | 4 |
| AD-12069 | 13 | AD-12374 | 9 | AD-9314 | 9 |
| AD-12338 | 15 | AD-12375 | 16 | | |

1. A double-stranded ribonucleic acid (dsRNA) for inhibiting expression of a human proprotein convertase subtilisin kexin 9 (PCSK9) gene in a cell, wherein the dsRNA comprises a sense strand and an antisense strand complementary to at least 15 contiguous nucleotides of a PCSK9 gene and comprises a duplex structure between 15 and 30 base pairs in length.

2. The dsRNA of claim 1 comprising a duplex structure between 19 and 21 base pairs in length.

3. The dsRNA of claim 1 wherein the sense strand comprises the nucleotide sequence of of a sense strand of Table 1 and the antisense strand comprises the nucleotide sequence of an antisense strand of Table 1.

4. The dsRNA of claim 1, consisting of a sense strand and an antisense strand of Table 1.

5. The dsRNA of claim 1, consisting of a modified dsRNA of Table 2.

6. The dsRNA of claim 1, wherein the dsRNA comprises at least one modified nucleotide.

7. The dsRNA of claim 1, wherein the dsRNA comprises at least one 2′-O-methyl modified nucleotide and at least one nucleotide comprising a 5′-phosphorothioate group.

8. The dsRNA claim 1, wherein the dsRNA comprises at least one modified nucleotide, wherein the modified nucleotide is chosen from the group of: a 2′-0-methyl modified nucleotide, a 2′-deoxy-2′-fluoro modified nucleotide, a 2′-deoxy-modified nucleotide, a locked nucleotide, an abasic nucleotide, 2′-amino-modified nucleotide, 2′-alkyl-modified nucleotide, a morpholino nucleotide, a phosphoramidate, a nucleotide comprising a 5′-phosphorothioate group, a terminal nucleotide linked to a cholesteryl derivative or dodecanoic acid bisdecylamide group, and a non-natural base comprising nucleotide.

9. A cell comprising the dsRNA of claim 1.

10. A pharmaceutical composition comprising the dsRNA of claim 1 and a pharmaceutically acceptable carrier.

11. A composition comprising the dsRNA of claim 1 and a lipid formulation.

12. A composition comprising the dsRNA of claim 1 and a lipid formulation, wherein the lipid formulation comprises a cationic lipid comprising ND-98.

13. A vector comprising a regulatory sequence operably linked to a nucleotide sequence that encodes at least one strand of the dsRNA of claim 1.

14. A cell comprising the vector of claim 13.

15. The dsRNA of claim 1, wherein contacting a cell in vitro with 30 nM or less of the dsRNA and maintaining the cell for a time sufficient to obtain degradation of a mRNA transcript of a PCSK9 gene, inhibits expression of the PCSK9 gene in the cell.

16. The dsRNA of claim 1, wherein contacting HepG2 cells expressing the PCSK9 gene in vitro with the dsRNA and maintaining the cells for a time sufficient to obtain degradation of a mRNA transcript of a PCSK9 gene, inhibits expression of the PCSK9 gene in the cell by at least 20%.

17. The dsRNA of claim 1, wherein administering the dsRNA to an animal decreases total serum cholesterol in the animal.

18. A method for inhibiting expression of a proprotein convertase subtilisin kexin 9 (PCSK9) gene in a cell comprising contacting the cell with the dsRNA of claim 1 and maintaining the cell for a time sufficient to obtain degradation of a mRNA transcript of a PCSK9 gene, thereby inhibiting expression of the PCSK9 gene in the cell.

19. A method of treating or managing pathological processes which can be mediated by down regulating expression of a proprotein convertase subtilisin kexin 9 (PCSK9) gene comprising administering to a patient in need of such treatment or management a therapeutically effective amount of the dsRNA of claim 1.

The application's sequence listing, which the Patent Office published only in electronic form, follows.

SEQUENCE LISTING (1505 sequences)

SEQ ID NO: 1 - DNA, 21 bp, Artificial Sequence
  Description of Artificial Sequence: Synthetic oligonucleotide
  Description of Combined DNA/RNA Molecule: Synthetic oligonucleotide
  siRNAs to PCSK9
  modified_base (1)..(1): 2'-hydroxy corresponding base
  modified_base (2)..(2): 2'-hydroxy corresponding base
  modified_base (3)..(3): 2'-hydroxy corresponding base
  modified_base (4)..(4): 2'-hydroxy corresponding base
  modified_base (5)..(5): 2'-hydroxy corresponding base
  modified_base (6)..(6): 2'-hydroxy corresponding base
  modified_base (7)..(7): 2'-hydroxy corresponding base
  modified_base (8)..(8): 2'-hydroxy corresponding base
  modified_base (9)..(9): 2'-hydroxy corresponding base
  modified_base (10)..(10): 2'-hydroxy corresponding base
  modified_base (11)..(11): 2'-hydroxy corresponding base
  modified_base (12)..(12): 2'-hydroxy corresponding base
  modified_base (13)..(13): 2'-hydroxy corresponding base
  modified_base (14)..(14): 2'-hydroxy corresponding base
  modified_base (15)..(15): 2'-hydroxy corresponding base
  modified_base (16)..(16): 2'-hydroxy corresponding base
  modified_base (17)..(17): 2'-hydroxy corresponding base
  modified_base (18)..(18): 2'-hydroxy corresponding base
  modified_base (19)..(19): 2'-hydroxy corresponding base
  modified_base (20)..(20): deoxythymidine
  modified_base (21)..(21): deoxythymidine
agcgacgucgaggcgcucatt

SEQ ID NO: 2 - DNA, 21 bp, Artificial Sequence
  Description of Artificial Sequence: Synthetic oligonucleotide
  Description of Combined DNA/RNA Molecule: Synthetic oligonucleotide
  siRNAs to PCSK9
  modified_base (1)..(1): 2'-hydroxy corresponding base
  modified_base (2)..(2): 2'-hydroxy corresponding base
  modified_base (3)..(3): 2'-hydroxy corresponding base
  modified_base (4)..(4): 2'-hydroxy corresponding base
  modified_base (5)..(5): 2'-hydroxy corresponding base
  modified_base (6)..(6): 2'-hydroxy corresponding base
  modified_base (7)..(7): 2'-hydroxy corresponding base
  modified_base (8)..(8): 2'-hydroxy corresponding base
  modified_base (9)..(9): 2'-hydroxy corresponding base
  modified_base (10)..(10): 2'-hydroxy corresponding base
  modified_base (11)..(11): 2'-hydroxy corresponding base
  modified_base (12)..(12): 2'-hydroxy corresponding base
  modified_base (13)..(13): 2'-hydroxy corresponding base
  modified_base (14)..(14): 2'-hydroxy corresponding base
  modified_base (15)..(15): 2'-hydroxy corresponding base
  modified_base (16)..(16): 2'-hydroxy corresponding base
  modified_base (17)..(17): 2'-hydroxy corresponding base
  modified_base (18)..(18): 2'-hydroxy corresponding base
  modified_base (19)..(19): 2'-hydroxy corresponding base
  modified_base (20)..(20): deoxythymidine
  modified_base (21)..(21): deoxythymidine
ugagcgccucgacgucgcutt

SEQ ID NO: 3 - DNA, 21 bp, Artificial Sequence
  Description of Artificial Sequence: Synthetic oligonucleotide
  Description of Combined DNA/RNA Molecule: Synthetic oligonucleotide
  siRNAs to PCSK9
  modified_base (1)..(1): 2'-hydroxy corresponding base
  modified_base (2)..(2): 2'-hydroxy corresponding base
  modified_base (3)..(3): 2'-hydroxy corresponding base
  modified_base (4)..(4): 2'-hydroxy corresponding base
  modified_base (5)..(5): 2'-hydroxy corresponding base
  modified_base (6)..(6): 2'-hydroxy corresponding base
  modified_base (7)..(7): 2'-hydroxy corresponding base
  modified_base (8)..(8): 2'-hydroxy corresponding base
  modified_base (9)..(9): 2'-hydroxy corresponding base
  modified_base (10)..(10): 2'-hydroxy corresponding base
  modified_base (11)..(11): 2'-hydroxy corresponding base
  modified_base (12)..(12): 2'-hydroxy corresponding base
  modified_base (13)..(13): 2'-hydroxy corresponding base
  modified_base (14)..(14): 2'-hydroxy corresponding base
  modified_base (15)..(15): 2'-hydroxy corresponding base
  modified_base (16)..(16): 2'-hydroxy corresponding base
  modified_base (17)..(17): 2'-hydroxy corresponding base
  modified_base (18)..(18): 2'-hydroxy corresponding base
  modified_base (19)..(19): 2'-hydroxy corresponding base
  modified_base (20)..(20): deoxythymidine
  modified_base (21)..(21): deoxythymidine
cgcucaugguugcaggcggtt

SEQ ID NO: 4 - DNA, 21 bp, Artificial Sequence
  Description of Artificial Sequence: Synthetic oligonucleotide
  Description of Combined DNA/RNA Molecule: Synthetic oligonucleotide
  siRNAs to PCSK9
  modified_base (1)..(1): 2'-hydroxy corresponding base
  modified_base (2)..(2): 2'-hydroxy corresponding base
  modified_base (3)..(3): 2'-hydroxy corresponding base
  modified_base (4)..(4): 2'-hydroxy corresponding base
  modified_base (5)..(5): 2'-hydroxy corresponding base
  modified_base (6)..(6): 2'-hydroxy corresponding base
  modified_base (7)..(7): 2'-hydroxy corresponding base
  modified_base (8)..(8): 2'-hydroxy corresponding base
  modified_base (9)..(9): 2'-hydroxy corresponding base
  modified_base (10)..(10): 2'-hydroxy corresponding base
  modified_base (11)..(11): 2'-hydroxy corresponding base
  modified_base (12)..(12): 2'-hydroxy corresponding base
  modified_base (13)..(13): 2'-hydroxy corresponding base
  modified_base (14)..(14): 2'-hydroxy corresponding base
  modified_base (15)..(15): 2'-hydroxy corresponding base
  modified_base (16)..(16): 2'-hydroxy corresponding base
  modified_base (17)..(17): 2'-hydroxy corresponding base
  modified_base (18)..(18): 2'-hydroxy corresponding base
  modified_base (19)..(19): 2'-hydroxy corresponding base
  modified_base (20)..(20): deoxythymidine
  modified_base (21)..(21): deoxythymidine
ccgccugcaaccaugagcgtt

SEQ ID NO: 5 - DNA, 21 bp, Artificial Sequence
  Description of Artificial Sequence: Synthetic oligonucleotide
  Description of Combined DNA/RNA Molecule: Synthetic oligonucleotide
  siRNAs to PCSK9
  modified_base (1)..(1): 2'-hydroxy corresponding base
  modified_base (2)..(2): 2'-hydroxy corresponding base
  modified_base (3)..(3): 2'-hydroxy corresponding base
  modified_base (4)..(4): 2'-hydroxy corresponding base
  modified_base (5)..(5): 2'-hydroxy corresponding base
  modified_base (6)..(6): 2'-hydroxy corresponding base
  modified_base (7)..(7): 2'-hydroxy corresponding base
  modified_base (8)..(8): 2'-hydroxy corresponding base
  modified_base (9)..(9): 2'-hydroxy corresponding base
  modified_base (10)..(10): 2'-hydroxy corresponding base
  modified_base (11)..(11): 2'-hydroxy corresponding base
  modified_base (12)..(12): 2'-hydroxy corresponding base
  modified_base (13)..(13): 2'-hydroxy corresponding base
  modified_base (14)..(14): 2'-hydroxy corresponding base
  modified_base (15)..(15): 2'-hydroxy corresponding base
  modified_base (16)..(16): 2'-hydroxy corresponding base
  modified_base (17)..(17): 2'-hydroxy corresponding base
  modified_base (18)..(18): 2'-hydroxy corresponding base
  modified_base (19)..(19): 2'-hydroxy corresponding base
  modified_base (20)..(20): deoxythymidine
  modified_base (21)..(21): deoxythymidine
gcucaugguugcaggcgggtt

SEQ ID NO: 6 - DNA, 21 bp, Artificial Sequence
  Description of Artificial Sequence: Synthetic oligonucleotide
  Description of Combined DNA/RNA Molecule: Synthetic oligonucleotide
  siRNAs to PCSK9
  modified_base (1)..(1): 2'-hydroxy corresponding base
  modified_base (2)..(2): 2'-hydroxy corresponding base
  modified_base (3)..(3): 2'-hydroxy corresponding base
  modified_base (4)..(4): 2'-hydroxy corresponding base
  modified_base (5)..(5): 2'-hydroxy corresponding base
  modified_base (6)..(6): 2'-hydroxy corresponding base
  modified_base (7)..(7): 2'-hydroxy corresponding base
  modified_base (8)..(8): 2'-hydroxy corresponding base
  modified_base (9)..(9): 2'-hydroxy corresponding base
  modified_base (10)..(10): 2'-hydroxy corresponding base
  modified_base (11)..(11): 2'-hydroxy corresponding base
  modified_base (12)..(12): 2'-hydroxy corresponding base
  modified_base (13)..(13): 2'-hydroxy corresponding base
  modified_base (14)..(14): 2'-hydroxy corresponding base
  modified_base (15)..(15): 2'-hydroxy corresponding base
  modified_base (16)..(16): 2'-hydroxy corresponding base
  modified_base (17)..(17): 2'-hydroxy corresponding base
  modified_base (18)..(18): 2'-hydroxy corresponding base
  modified_base (19)..(19): 2'-hydroxy corresponding base
  modified_base (20)..(20): deoxythymidine
  modified_base (21)..(21): deoxythymidine
cccgccugcaaccaugagctt

SEQ ID NO: 7 - DNA, 21 bp, Artificial Sequence
  Description of Artificial Sequence: Synthetic oligonucleotide
  Description of Combined DNA/RNA Molecule: Synthetic oligonucleotide
  siRNAs to PCSK9
  modified_base (1)..(1): 2'-hydroxy corresponding base
  modified_base (2)..(2): 2'-hydroxy corresponding base
  modified_base (3)..(3): 2'-hydroxy corresponding base
  modified_base (4)..(4): 2'-hydroxy corresponding base
  modified_base (5)..(5): 2'-hydroxy corresponding base
  modified_base (6)..(6): 2'-hydroxy corresponding base
  modified_base (7)..(7): 2'-hydroxy corresponding base
  modified_base (8)..(8): 2'-hydroxy corresponding base
  modified_base (9)..(9): 2'-hydroxy corresponding base
  modified_base (10)..(10): 2'-hydroxy corresponding base
  modified_base (11)..(11): 2'-hydroxy corresponding base
  modified_base (12)..(12): 2'-hydroxy corresponding base
  modified_base (13)..(13): 2'-hydroxy corresponding base
  modified_base (14)..(14): 2'-hydroxy corresponding base
  modified_base (15)..(15): 2'-hydroxy corresponding base
  modified_base (16)..(16): 2'-hydroxy corresponding base
  modified_base (17)..(17): 2'-hydroxy corresponding base
  modified_base (18)..(18): 2'-hydroxy corresponding base
  modified_base (19)..(19): 2'-hydroxy corresponding base
  modified_base (20)..(20): deoxythymidine
  modified_base (21)..(21): deoxythymidine
gcgggcgccgccguucagutt

SEQ ID NO: 8 - DNA, 21 bp, Artificial Sequence
  Description of Artificial Sequence: Synthetic oligonucleotide
  Description of Combined DNA/RNA Molecule: Synthetic oligonucleotide
  siRNAs to PCSK9
  modified_base (1)..(1): 2'-hydroxy corresponding base
  modified_base (2)..(2): 2'-hydroxy corresponding base
  modified_base (3)..(3): 2'-hydroxy corresponding base
  modified_base (4)..(4): 2'-hydroxy corresponding base
  modified_base (5)..(5): 2'-hydroxy corresponding base
  modified_base (6)..(6): 2'-hydroxy corresponding base
  modified_base (7)..(7): 2'-hydroxy corresponding base
  modified_base (8)..(8): 2'-hydroxy corresponding base
  modified_base (9)..(9): 2'-hydroxy corresponding base
  modified_base (10)..(10): 2'-hydroxy corresponding base
  modified_base (11)..(11): 2'-hydroxy corresponding base
  modified_base (12)..(12): 2'-hydroxy corresponding base
  modified_base (13)..(13): 2'-hydroxy corresponding base
  modified_base (14)..(14): 2'-hydroxy corresponding base
  modified_base (15)..(15): 2'-hydroxy corresponding base
  modified_base (16)..(16): 2'-hydroxy corresponding base
  modified_base (17)..(17): 2'-hydroxy corresponding base
  modified_base (18)..(18): 2'-hydroxy corresponding base
  modified_base (19)..(19): 2'-hydroxy corresponding base
  modified_base (20)..(20): deoxythymidine
  modified_base (21)..(21): deoxythymidine
acugaacggcggcgcccgctt

SEQ ID NO: 9 - DNA, 21 bp, Artificial Sequence
  Description of Artificial Sequence: Synthetic oligonucleotide
  Description of Combined DNA/RNA Molecule: Synthetic oligonucleotide
  siRNAs to PCSK9
  modified_base (1)..(1): 2'-hydroxy corresponding base
  modified_base (2)..(2): 2'-hydroxy corresponding base
  modified_base (3)..(3): 2'-hydroxy corresponding base
  modified_base (4)..(4): 2'-hydroxy corresponding base
  modified_base (5)..(5): 2'-hydroxy corresponding base
  modified_base (6)..(6): 2'-hydroxy corresponding base
  modified_base (7)..(7): 2'-hydroxy corresponding base
  modified_base (8)..(8): 2'-hydroxy corresponding base
  modified_base (9)..(9): 2'-hydroxy corresponding base
  modified_base (10)..(10): 2'-hydroxy corresponding base
  modified_base (11)..(11): 2'-hydroxy corresponding base
  modified_base (12)..(12): 2'-hydroxy corresponding base
  modified_base (13)..(13): 2'-hydroxy corresponding base
  modified_base (14)..(14): 2'-hydroxy corresponding base
  modified_base (15)..(15): 2'-hydroxy corresponding base
  modified_base (16)..(16): 2'-hydroxy corresponding base
  modified_base (17)..(17): 2'-hydroxy corresponding base
  modified_base (18)..(18): 2'-hydroxy corresponding base
  modified_base (19)..(19): 2'-hydroxy corresponding base
  modified_base (20)..(20): deoxythymidine
  modified_base (21)..(21): deoxythymidine
cgggcgccgccguucaguutt

SEQ ID NO: 10 - DNA, 21 bp, Artificial Sequence
  Description of Artificial Sequence: Synthetic oligonucleotide
  Description of Combined DNA/RNA Molecule: Synthetic oligonucleotide
  siRNAs to PCSK9
  modified_base (1)..(1): 2'-hydroxy corresponding base
  modified_base (2)..(2): 2'-hydroxy corresponding base
  modified_base (3)..(3): 2'-hydroxy corresponding base
  modified_base (4)..(4): 2'-hydroxy corresponding base
  modified_base (5)..(5): 2'-hydroxy corresponding base
  modified_base (6)..(6): 2'-hydroxy corresponding base
  modified_base (7)..(7): 2'-hydroxy corresponding base
  modified_base (8)..(8): 2'-hydroxy corresponding base
  modified_base (9)..(9): 2'-hydroxy corresponding base
  modified_base (10)..(10): 2'-hydroxy corresponding base
  modified_base (11)..(11): 2'-hydroxy corresponding base
  modified_base (12)..(12): 2'-hydroxy corresponding base
  modified_base (13)..(13): 2'-hydroxy corresponding base
  modified_base (14)..(14): 2'-hydroxy corresponding base
  modified_base (15)..(15): 2'-hydroxy corresponding base
  modified_base (16)..(16): 2'-hydroxy corresponding base
  modified_base (17)..(17): 2'-hydroxy corresponding base
  modified_base (18)..(18): 2'-hydroxy corresponding base
  modified_base (19)..(19): 2'-hydroxy corresponding base
  modified_base (20)..(20): deoxythymidine
  modified_base (21)..(21): deoxythymidine
aacugaacggcggcgcccgtt

SEQ ID NO: 11 - DNA, 21 bp, Artificial Sequence
  Description of Artificial Sequence: Synthetic oligonucleotide
  Description of Combined DNA/RNA Molecule: Synthetic oligonucleotide
  siRNAs to PCSK9
  modified_base (1)..(1): 2'-hydroxy corresponding base
  modified_base (2)..(2): 2'-hydroxy corresponding base
  modified_base (3)..(3): 2'-hydroxy corresponding base
  modified_base (4)..(4): 2'-hydroxy corresponding base
  modified_base (5)..(5): 2'-hydroxy corresponding base
  modified_base (6)..(6): 2'-hydroxy corresponding base
  modified_base (7)..(7): 2'-hydroxy corresponding base
  modified_base (8)..(8): 2'-hydroxy corresponding base
  modified_base (9)..(9): 2'-hydroxy corresponding base
  modified_base (10)..(10): 2'-hydroxy corresponding base
  modified_base (11)..(11): 2'-hydroxy corresponding base
  modified_base (12)..(12): 2'-hydroxy corresponding base
  modified_base (13)..(13): 2'-hydroxy corresponding base
  modified_base (14)..(14): 2'-hydroxy corresponding base
  modified_base (15)..(15): 2'-hydroxy corresponding base
  modified_base (16)..(16): 2'-hydroxy corresponding base
  modified_base (17)..(17): 2'-hydroxy corresponding base
  modified_base (18)..(18): 2'-hydroxy corresponding base
  modified_base (19)..(19): 2'-hydroxy corresponding base
  modified_base (20)..(20): deoxythymidine
  modified_base (21)..(21): deoxythymidine
gggcgccgccguucaguuctt

SEQ ID NO: 12 - DNA, 21 bp, Artificial Sequence
  Description of Artificial Sequence: Synthetic oligonucleotide
  Description of Combined DNA/RNA Molecule: Synthetic oligonucleotide
  siRNAs to PCSK9
  modified_base (1)..(1): 2'-hydroxy corresponding base
  modified_base (2)..(2): 2'-hydroxy corresponding base
  modified_base (3)..(3): 2'-hydroxy corresponding base
  modified_base (4)..(4): 2'-hydroxy corresponding base
  modified_base (5)..(5): 2'-hydroxy corresponding base
  modified_base (6)..(6): 2'-hydroxy corresponding base
  modified_base (7)..(7): 2'-hydroxy corresponding base
  modified_base (8)..(8): 2'-hydroxy corresponding base
  modified_base (9)..(9): 2'-hydroxy corresponding base
  modified_base (10)..(10): 2'-hydroxy corresponding base
  modified_base (11)..(11): 2'-hydroxy corresponding base
  modified_base (12)..(12): 2'-hydroxy corresponding base
  modified_base (13)..(13): 2'-hydroxy corresponding base
  modified_base (14)..(14): 2'-hydroxy corresponding base
  modified_base (15)..(15): 2'-hydroxy corresponding base
  modified_base (16)..(16): 2'-hydroxy corresponding base
  modified_base (17)..(17): 2'-hydroxy corresponding base
  modified_base (18)..(18): 2'-hydroxy corresponding base
  modified_base (19)..(19): 2'-hydroxy corresponding base
  modified_base (20)..(20): deoxythymidine
  modified_base (21)..(21): deoxythymidine
gaacugaacggcggcgccctt

SEQ ID NO: 13 - DNA, 21 bp, Artificial Sequence
  Description of Artificial Sequence: Synthetic oligonucleotide
  Description of Combined DNA/RNA Molecule: Synthetic oligonucleotide
  siRNAs to PCSK9
  modified_base (1)..(1): 2'-hydroxy corresponding base
  modified_base (2)..(2): 2'-hydroxy corresponding base
  modified_base (3)..(3): 2'-hydroxy corresponding base
  modified_base (4)..(4): 2'-hydroxy corresponding base
  modified_base (5)..(5): 2'-hydroxy corresponding base
  modified_base (6)..(6): 2'-hydroxy corresponding base
  modified_base (7)..(7): 2'-hydroxy corresponding base
  modified_base (8)..(8): 2'-hydroxy corresponding base
  modified_base (9)..(9): 2'-hydroxy corresponding base
  modified_base (10)..(10): 2'-hydroxy corresponding base
  modified_base (11)..(11): 2'-hydroxy corresponding base
  modified_base (12)..(12): 2'-hydroxy corresponding base
  modified_base (13)..(13): 2'-hydroxy corresponding base
  modified_base (14)..(14): 2'-hydroxy corresponding base
  modified_base (15)..(15): 2'-hydroxy corresponding base
  modified_base (16)..(16): 2'-hydroxy corresponding base
  modified_base (17)..(17): 2'-hydroxy corresponding base
  modified_base (18)..(18): 2'-hydroxy corresponding base
  modified_base (19)..(19): 2'-hydroxy corresponding base
  modified_base (20)..(20): deoxythymidine
  modified_base (21)..(21): deoxythymidine
ccguucaguucagggucugtt

SEQ ID NO: 14 - DNA, 21 bp, Artificial Sequence
  Description of Artificial Sequence: Synthetic oligonucleotide
  Description of Combined DNA/RNA Molecule: Synthetic oligonucleotide
  siRNAs to PCSK9
  modified_base (1)..(1): 2'-hydroxy corresponding base
  modified_base (2)..(2): 2'-hydroxy corresponding base
  modified_base (3)..(3): 2'-hydroxy corresponding base
  modified_base (4)..(4): 2'-hydroxy corresponding base
  modified_base (5)..(5): 2'-hydroxy corresponding base
  modified_base (6)..(6): 2'-hydroxy corresponding base
  modified_base (7)..(7): 2'-hydroxy corresponding base
  modified_base (8)..(8): 2'-hydroxy corresponding base
  modified_base (9)..(9): 2'-hydroxy corresponding base
  modified_base (10)..(10): 2'-hydroxy corresponding base
  modified_base (11)..(11): 2'-hydroxy corresponding base
  modified_base (12)..(12): 2'-hydroxy corresponding base
  modified_base (13)..(13): 2'-hydroxy corresponding base
  modified_base (14)..(14): 2'-hydroxy corresponding base
  modified_base (15)..(15): 2'-hydroxy corresponding base
  modified_base (16)..(16): 2'-hydroxy corresponding base
  modified_base (17)..(17): 2'-hydroxy corresponding base
  modified_base (18)..(18): 2'-hydroxy corresponding base
  modified_base (19)..(19): 2'-hydroxy corresponding base
  modified_base (20)..(20): deoxythymidine
  modified_base (21)..(21): deoxythymidine
cagacccugaacugaacggtt

SEQ ID NO: 15 - DNA, 21 bp, Artificial Sequence
  Description of Artificial Sequence: Synthetic oligonucleotide
  Description of Combined DNA/RNA Molecule: Synthetic oligonucleotide
  siRNAs to PCSK9
  modified_base (1)..(1): 2'-hydroxy corresponding base
  modified_base (2)..(2): 2'-hydroxy corresponding base
  modified_base (3)..(3): 2'-hydroxy corresponding base
  modified_base (4)..(4): 2'-hydroxy corresponding base
  modified_base (5)..(5): 2'-hydroxy corresponding base
  modified_base (6)..(6): 2'-hydroxy corresponding base
  modified_base (7)..(7): 2'-hydroxy corresponding base
  modified_base (8)..(8): 2'-hydroxy corresponding base
  modified_base (9)..(9): 2'-hydroxy corresponding base
  modified_base (10)..(10): 2'-hydroxy corresponding base
  modified_base (11)..(11): 2'-hydroxy corresponding base
  modified_base (12)..(12): 2'-hydroxy corresponding base
  modified_base (13)..(13): 2'-hydroxy corresponding base
  modified_base (14)..(14): 2'-hydroxy corresponding base
  modified_base (15)..(15): 2'-hydroxy corresponding base
  modified_base (16)..(16): 2'-hydroxy corresponding base
  modified_base (17)..(17): 2'-hydroxy corresponding base
  modified_base (18)..(18): 2'-hydroxy corresponding base
  modified_base (19)..(19): 2'-hydroxy corresponding base
  modified_base (20)..(20): deoxythymidine
  modified_base (21)..(21): deoxythymidine
uucaguucagggucugagctt

SEQ ID NO: 16 - DNA, 21 bp, Artificial Sequence
  Description of Artificial Sequence: Synthetic oligonucleotide
  Description of Combined DNA/RNA Molecule: Synthetic oligonucleotide
  siRNAs to PCSK9
  modified_base (1)..(1): 2'-hydroxy corresponding base
  modified_base (2)..(2): 2'-hydroxy corresponding base
  modified_base (3)..(3): 2'-hydroxy corresponding base
  modified_base (4)..(4): 2'-hydroxy corresponding base
  modified_base (5)..(5): 2'-hydroxy corresponding base
  modified_base (6)..(6): 2'-hydroxy corresponding base
  modified_base (7)..(7): 2'-hydroxy corresponding base
  modified_base (8)..(8): 2'-hydroxy corresponding base
  modified_base (9)..(9): 2'-hydroxy corresponding base
  modified_base (10)..(10): 2'-hydroxy corresponding base
  modified_base (11)..(11): 2'-hydroxy corresponding base
  modified_base (12)..(12): 2'-hydroxy corresponding base
  modified_base (13)..(13): 2'-hydroxy corresponding base
  modified_base (14)..(14): 2'-hydroxy corresponding base
  modified_base (15)..(15): 2'-hydroxy corresponding base
  modified_base (16)..(16): 2'-hydroxy corresponding base
  modified_base (17)..(17): 2'-hydroxy corresponding base
  modified_base (18)..(18): 2'-hydroxy corresponding base
  modified_base (19)..(19): 2'-hydroxy corresponding base
  modified_base (20)..(20): deoxythymidine
  modified_base (21)..(21): deoxythymidine
gcucagacccugaacugaatt

SEQ ID NO: 17 - DNA, 21 bp, Artificial Sequence
  Description of Artificial Sequence: Synthetic oligonucleotide
  Description of Combined DNA/RNA Molecule: Synthetic oligonucleotide
  siRNAs to PCSK9
  modified_base (1)..(1): 2'-hydroxy corresponding base
  modified_base (2)..(2): 2'-hydroxy corresponding base
  modified_base (3)..(3): 2'-hydroxy corresponding base
  modified_base (4)..(4): 2'-hydroxy corresponding base
  modified_base (5)..(5): 2'-hydroxy corresponding base
  modified_base (6)..(6): 2'-hydroxy corresponding base
  modified_base (7)..(7): 2'-hydroxy corresponding base
  modified_base (8)..(8): 2'-hydroxy corresponding base
  modified_base (9)..(9): 2'-hydroxy corresponding base
  modified_base (10)..(10): 2'-hydroxy corresponding base
  modified_base (11)..(11): 2'-hydroxy corresponding base
  modified_base (12)..(12): 2'-hydroxy corresponding base
  modified_base (13)..(13): 2'-hydroxy corresponding base
  modified_base (14)..(14): 2'-hydroxy corresponding base
  modified_base (15)..(15): 2'-hydroxy corresponding base
  modified_base (16)..(16): 2'-hydroxy corresponding base
  modified_base (17)..(17): 2'-hydroxy corresponding base
  modified_base (18)..(18): 2'-hydroxy corresponding base
  modified_base (19)..(19): 2'-hydroxy corresponding base
  modified_base (20)..(20): deoxythymidine
  modified_base (21)..(21): deoxythymidine
gugagacuggcucgggcggtt

SEQ ID NO: 18 - DNA, 21 bp, Artificial Sequence
  Description of Artificial Sequence: Synthetic oligonucleotide
  Description of Combined DNA/RNA Molecule: Synthetic oligonucleotide
  siRNAs to PCSK9
  modified_base (1)..(1): 2'-hydroxy corresponding base
  modified_base (2)..(2): 2'-hydroxy corresponding base
  modified_base (3)..(3): 2'-hydroxy corresponding base
  modified_base (4)..(4): 2'-hydroxy corresponding base
  modified_base (5)..(5): 2'-hydroxy corresponding base
  modified_base (6)..(6): 2'-hydroxy corresponding base
  modified_base (7)..(7): 2'-hydroxy corresponding base
  modified_base (8)..(8): 2'-hydroxy corresponding base
  modified_base (9)..(9): 2'-hydroxy corresponding base
  modified_base (10)..(10): 2'-hydroxy corresponding base
  modified_base (11)..(11): 2'-hydroxy corresponding base
  modified_base (12)..(12): 2'-hydroxy corresponding base
  modified_base (13)..(13): 2'-hydroxy corresponding base
  modified_base (14)..(14): 2'-hydroxy corresponding base
  modified_base (15)..(15): 2'-hydroxy corresponding base
  modified_base (16)..(16): 2'-hydroxy corresponding base
  modified_base (17)..(17): 2'-hydroxy corresponding base
  modified_base (18)..(18): 2'-hydroxy corresponding base
  modified_base (19)..(19): 2'-hydroxy corresponding base
  modified_base (20)..(20): deoxythymidine
  modified_base (21)..(21): deoxythymidine
ccgcccgagccagucucactt

SEQ ID NO: 19 - DNA, 21 bp, Artificial Sequence
  Description of Artificial Sequence: Synthetic oligonucleotide
  Description of Combined DNA/RNA Molecule: Synthetic oligonucleotide
  siRNAs to PCSK9
  modified_base (1)..(1): 2'-hydroxy corresponding base
  modified_base (2)..(2): 2'-hydroxy corresponding base
  modified_base (3)..(3): 2'-hydroxy corresponding base
  modified_base (4)..(4): 2'-hydroxy corresponding base
  modified_base (5)..(5): 2'-hydroxy corresponding base
  modified_base (6)..(6): 2'-hydroxy corresponding base
  modified_base (7)..(7): 2'-hydroxy corresponding base
  modified_base (8)..(8): 2'-hydroxy corresponding base
  modified_base (9)..(9): 2'-hydroxy corresponding base
  modified_base (10)..(10): 2'-hydroxy corresponding base
  modified_base (11)..(11): 2'-hydroxy corresponding base
  modified_base (12)..(12): 2'-hydroxy corresponding base
  modified_base (13)..(13): 2'-hydroxy corresponding base
  modified_base (14)..(14): 2'-hydroxy corresponding base
  modified_base (15)..(15): 2'-hydroxy corresponding base
  modified_base (16)..(16): 2'-hydroxy corresponding base
  modified_base (17)..(17): 2'-hydroxy corresponding base
  modified_base (18)..(18): 2'-hydroxy corresponding base
  modified_base (19)..(19): 2'-hydroxy corresponding base
  modified_base (20)..(20): deoxythymidine
  modified_base (21)..(21): deoxythymidine
ggccgggacgcgucguugctt

SEQ ID NO: 20 - DNA, 21 bp, Artificial Sequence
  Description of Artificial Sequence: Synthetic oligonucleotide
  Description of Combined DNA/RNA Molecule: Synthetic oligonucleotide
  siRNAs to PCSK9
  modified_base (1)..(1): 2'-hydroxy corresponding base
  modified_base (2)..(2): 2'-hydroxy corresponding base
  modified_base (3)..(3): 2'-hydroxy corresponding base
  modified_base (4)..(4): 2'-hydroxy corresponding base
  modified_base (5)..(5): 2'-hydroxy corresponding base
  modified_base (6)..(6): 2'-hydroxy corresponding base
  modified_base (7)..(7): 2'-hydroxy corresponding base
  modified_base (8)..(8): 2'-hydroxy corresponding base
  modified_base (9)..(9): 2'-hydroxy corresponding base
  modified_base (10)..(10): 2'-hydroxy corresponding base
  modified_base (11)..(11): 2'-hydroxy corresponding base
  modified_base (12)..(12): 2'-hydroxy corresponding base
  modified_base (13)..(13): 2'-hydroxy corresponding base
  modified_base (14)..(14): 2'-hydroxy corresponding base
  modified_base (15)..(15): 2'-hydroxy corresponding base
  modified_base (16)..(16): 2'-hydroxy corresponding base
  modified_base (17)..(17): 2'-hydroxy corresponding base
  modified_base (18)..(18): 2'-hydroxy corresponding base
  modified_base (19)..(19): 2'-hydroxy corresponding base
  modified_base (20)..(20): deoxythymidine
  modified_base (21)..(21): deoxythymidine
gcaacgacgcgucccggcctt

SEQ ID NO: 21 - DNA, 21 bp, Artificial Sequence
  Description of Artificial Sequence: Synthetic oligonucleotide
  Description of Combined DNA/RNA Molecule: Synthetic oligonucleotide
  siRNAs to PCSK9
  modified_base (1)..(1): 2'-hydroxy corresponding base
  modified_base (2)..(2): 2'-hydroxy corresponding base
  modified_base (3)..(3): 2'-hydroxy corresponding base
  modified_base (4)..(4): 2'-hydroxy corresponding base
  modified_base (5)..(5): 2'-hydroxy corresponding base
  modified_base (6)..(6): 2'-hydroxy corresponding base
  modified_base (7)..(7): 2'-hydroxy corresponding base
  modified_base (8)..(8): 2'-hydroxy corresponding base
  modified_base (9)..(9): 2'-hydroxy corresponding base
  modified_base (10)..(10): 2'-hydroxy corresponding base
  modified_base (11)..(11): 2'-hydroxy corresponding base
  modified_base (12)..(12): 2'-hydroxy corresponding base
  modified_base (13)..(13): 2'-hydroxy corresponding base
  modified_base (14)..(14): 2'-hydroxy corresponding base
  modified_base (15)..(15): 2'-hydroxy corresponding base
  modified_base (16)..(16): 2'-hydroxy corresponding base
  modified_base (17)..(17): 2'-hydroxy corresponding base
  modified_base (18)..(18): 2'-hydroxy corresponding base
  modified_base (19)..(19): 2'-hydroxy corresponding base
  modified_base (20)..(20): deoxythymidine
  modified_base (21)..(21): deoxythymidine
gccgggacgcgucguugcatt

SEQ ID NO: 22 - DNA, 21 bp, Artificial Sequence
  Description of Artificial Sequence: Synthetic oligonucleotide
  Description of Combined DNA/RNA Molecule: Synthetic oligonucleotide
  siRNAs to PCSK9
  modified_base (1)..(1): 2'-hydroxy corresponding base
  modified_base (2)..(2): 2'-hydroxy corresponding base
  modified_base (3)..(3): 2'-hydroxy corresponding base
  modified_base (4)..(4): 2'-hydroxy corresponding base
  modified_base (5)..(5): 2'-hydroxy corresponding base
  modified_base (6)..(6): 2'-hydroxy corresponding base
  modified_base (7)..(7): 2'-hydroxy corresponding base
  modified_base (8)..(8): 2'-hydroxy corresponding base
  modified_base (9)..(9): 2'-hydroxy corresponding base
  modified_base (10)..(10): 2'-hydroxy corresponding base
  modified_base (11)..(11): 2'-hydroxy corresponding base
  modified_base (12)..(12): 2'-hydroxy corresponding base
  modified_base (13)..(13): 2'-hydroxy corresponding base
  modified_base (14)..(14): 2'-hydroxy corresponding base
  modified_base (15)..(15): 2'-hydroxy corresponding base
  modified_base (16)..(16): 2'-hydroxy corresponding base
  modified_base (17)..(17): 2'-hydroxy corresponding base
  modified_base (18)..(18): 2'-hydroxy corresponding base
  modified_base (19)..(19): 2'-hydroxy corresponding base
  modified_base (20)..(20): deoxythymidine
  modified_base (21)..(21): deoxythymidine
ugcaacgacgcgucccggctt

SEQ ID NO: 23 - DNA, 21 bp, Artificial Sequence
  Description of Artificial Sequence: Synthetic oligonucleotide
  Description of Combined DNA/RNA Molecule: Synthetic oligonucleotide
  siRNAs to PCSK9
  modified_base (1)..(1): 2'-hydroxy corresponding base
  modified_base (2)..(2): 2'-hydroxy corresponding base
  modified_base (3)..(3): 2'-hydroxy corresponding base
  modified_base (4)..(4): 2'-hydroxy corresponding base
  modified_base (5)..(5): 2'-hydroxy corresponding base
  modified_base (6)..(6): 2'-hydroxy corresponding base
  modified_base (7)..(7): 2'-hydroxy corresponding base
  modified_base (8)..(8): 2'-hydroxy corresponding base
  modified_base (9)..(9): 2'-hydroxy corresponding base
  modified_base (10)..(10): 2'-hydroxy corresponding base
  modified_base (11)..(11): 2'-hydroxy corresponding base
  modified_base (12)..(12): 2'-hydroxy corresponding base
  modified_base (13)..(13): 2'-hydroxy corresponding base
  modified_base (14)..(14): 2'-hydroxy corresponding base
  modified_base (15)..(15): 2'-hydroxy corresponding base
  modified_base (16)..(16): 2'-hydroxy corresponding base
  modified_base (17)..(17): 2'-hydroxy corresponding base
  modified_base (18)..(18): 2'-hydroxy corresponding base
  modified_base (19)..(19): 2'-hydroxy corresponding base
  modified_base (20)..(20): deoxythymidine
  modified_base (21)..(21): deoxythymidine
ccgggacgcgucguugcagtt

SEQ ID NO: 24 - DNA, 21 bp, Artificial Sequence
  Description of Artificial Sequence: Synthetic oligonucleotide
  Description of Combined DNA/RNA Molecule: Synthetic oligonucleotide
  siRNAs to PCSK9
  modified_base (1)..(1): 2'-hydroxy corresponding base
  modified_base (2)..(2): 2'-hydroxy corresponding base
  modified_base (3)..(3): 2'-hydroxy corresponding base
  modified_base (4)..(4): 2'-hydroxy corresponding base
  modified_base (5)..(5): 2'-hydroxy corresponding base
  modified_base (6)..(6): 2'-hydroxy corresponding base
  modified_base (7)..(7): 2'-hydroxy corresponding base
  modified_base (8)..(8): 2'-hydroxy corresponding base
  modified_base (9)..(9): 2'-hydroxy corresponding base
  modified_base (10)..(10): 2'-hydroxy corresponding base
  modified_base (11)..(11): 2'-hydroxy corresponding base
  modified_base (12)..(12): 2'-hydroxy corresponding base
  modified_base (13)..(13): 2'-hydroxy corresponding base
  modified_base (14)..(14): 2'-hydroxy corresponding base
  modified_base (15)..(15): 2'-hydroxy corresponding base
  modified_base (16)..(16): 2'-hydroxy corresponding base
  modified_base (17)..(17): 2'-hydroxy corresponding base
  modified_base (18)..(18): 2'-hydroxy corresponding base
  modified_base (19)..(19): 2'-hydroxy corresponding base
  modified_base (20)..(20): deoxythymidine
  modified_base (21)..(21): deoxythymidine
cugcaacgacgcgucccggtt

SEQ ID NO: 25 - DNA, 21 bp, Artificial Sequence
  Description of Artificial Sequence: Synthetic oligonucleotide
  Description of Combined DNA/RNA Molecule: Synthetic oligonucleotide
  siRNAs to PCSK9
  modified_base (1)..(1): 2'-hydroxy corresponding base
  modified_base (2)..(2): 2'-hydroxy corresponding base
  modified_base (3)..(3): 2'-hydroxy corresponding base
  modified_base (4)..(4): 2'-hydroxy corresponding base
  modified_base (5)..(5): 2'-hydroxy corresponding base
  modified_base (6)..(6): 2'-hydroxy corresponding base
  modified_base (7)..(7): 2'-hydroxy corresponding base
  modified_base (8)..(8): 2'-hydroxy corresponding base
  modified_base (9)..(9): 2'-hydroxy corresponding base
  modified_base (10)..(10): 2'-hydroxy corresponding base
  modified_base (11)..(11): 2'-hydroxy corresponding base
  modified_base (12)..(12): 2'-hydroxy corresponding base
  modified_base (13)..(13): 2'-hydroxy corresponding base
  modified_base (14)..(14): 2'-hydroxy corresponding base
  modified_base (15)..(15): 2'-hydroxy corresponding base
  modified_base (16)..(16): 2'-hydroxy corresponding base
  modified_base (17)..(17): 2'-hydroxy corresponding base
  modified_base (18)..(18): 2'-hydroxy corresponding base
  modified_base (19)..(19): 2'-hydroxy corresponding base
  modified_base (20)..(20): deoxythymidine
  modified_base (21)..(21): deoxythymidine
ggacgcgucguugcagcagtt

SEQ ID NO: 26 - DNA, 21 bp, Artificial Sequence
  Description of Artificial Sequence: Synthetic oligonucleotide
  Description of Combined DNA/RNA Molecule: Synthetic oligonucleotide
  siRNAs to PCSK9
  modified_base (1)..(1): 2'-hydroxy corresponding base
  modified_base (2)..(2): 2'-hydroxy corresponding base
  modified_base (3)..(3): 2'-hydroxy corresponding base
  modified_base (4)..(4): 2'-hydroxy corresponding base
  modified_base (5)..(5): 2'-hydroxy corresponding base
  modified_base (6)..(6): 2'-hydroxy corresponding base
  modified_base (7)..(7): 2'-hydroxy corresponding base
  modified_base (8)..(8): 2'-hydroxy corresponding base
  modified_base (9)..(9): 2'-hydroxy corresponding base
  modified_base (10)..(10): 2'-hydroxy corresponding base
  modified_base (11)..(11): 2'-hydroxy corresponding base
  modified_base (12)..(12): 2'-hydroxy corresponding base
  modified_base (13)..(13): 2'-hydroxy corresponding base
  modified_base (14)..(14): 2'-hydroxy corresponding base
  modified_base (15)..(15): 2'-hydroxy corresponding base
  modified_base (16)..(16): 2'-hydroxy corresponding base
  modified_base (17)..(17): 2'-hydroxy corresponding base
  modified_base (18)..(18): 2'-hydroxy corresponding base
  modified_base (19)..(19): 2'-hydroxy corresponding base
  modified_base (20)..(20): deoxythymidine
  modified_base (21)..(21): deoxythymidine
cugcugcaacgacgcgucctt

SEQ ID NO: 27 - DNA, 21 bp, Artificial Sequence
  Description of Artificial Sequence: Synthetic oligonucleotide
  Description of Combined DNA/RNA Molecule: Synthetic oligonucleotide
  siRNAs to PCSK9
  modified_base (1)..(1): 2'-hydroxy corresponding base
  modified_base (2)..(2): 2'-hydroxy corresponding base
  modified_base (3)..(3): 2'-hydroxy corresponding base
  modified_base (4)..(4): 2'-hydroxy corresponding base
  modified_base (5)..(5): 2'-hydroxy corresponding base
  modified_base (6)..(6): 2'-hydroxy corresponding base
  modified_base (7)..(7): 2'-hydroxy corresponding base
  modified_base (8)..(8): 2'-hydroxy corresponding base
  modified_base (9)..(9): 2'-hydroxy corresponding base
  modified_base (10)..(10): 2'-hydroxy corresponding base
  modified_base (11)..(11): 2'-hydroxy corresponding base
  modified_base (12)..(12): 2'-hydroxy corresponding base
  modified_base (13)..(13): 2'-hydroxy corresponding base
  modified_base (14)..(14): 2'-hydroxy corresponding base
  modified_base (15)..(15): 2'-hydroxy corresponding base
  modified_base (16)..(16): 2'-hydroxy corresponding base
  modified_base (17)..(17): 2'-hydroxy corresponding base
  modified_base (18)..(18): 2'-hydroxy corresponding base
  modified_base (19)..(19): 2'-hydroxy corresponding base
  modified_base (20)..(20): deoxythymidine
  modified_base (21)..(21): 5'-thio thymidine
ucccagccaggauuccgcgtt

SEQ ID NO: 28 - DNA, 21 bp, Artificial Sequence
  Description of Artificial Sequence: Synthetic oligonucleotide
  Description of Combined DNA/RNA Molecule: Synthetic oligonucleotide
  siRNAs to PCSK9
  modified_base (1)..(1): 2'-hydroxy corresponding base
  modified_base (2)..(2): 2'-hydroxy corresponding base
  modified_base (3)..(3): 2'-hydroxy corresponding base
  modified_base (4)..(4): 2'-hydroxy corresponding base
  modified_base (5)..(5): 2'-hydroxy corresponding base
  modified_base (6)..(6): 2'-hydroxy corresponding base
  modified_base (7)..(7): 2'-hydroxy corresponding base
  modified_base (8)..(8): 2'-hydroxy corresponding base
  modified_base (9)..(9): 2'-hydroxy corresponding base
  modified_base (10)..(10): 2'-hydroxy corresponding base
  modified_base (11)..(11): 2'-hydroxy corresponding base
  modified_base (12)..(12): 2'-hydroxy corresponding base
  modified_base (13)..(13): 2'-hydroxy corresponding base
  modified_base (14)..(14): 2'-hydroxy corresponding base
  modified_base (15)..(15): 2'-hydroxy corresponding base
  modified_base (16)..(16): 2'-hydroxy corresponding base
  modified_base (17)..(17): 2'-hydroxy corresponding base
  modified_base (18)..(18): 2'-hydroxy corresponding base
  modified_base (19)..(19): 2'-hydroxy corresponding base
  modified_base (20)..(20): deoxythymidine
  modified_base (21)..(21): 5'-thio thymidine
cgcggaauccuggcugggatt

SEQ ID NO: 29 - DNA, 21 bp, Artificial Sequence
  Description of Artificial Sequence: Synthetic oligonucleotide
  Description of Combined DNA/RNA Molecule: Synthetic oligonucleotide
  siRNAs to PCSK9
  modified_base (1)..(1): 2'-O-methyl corresponding base
  modified_base (2)..(2): 2'-O-methyl corresponding base
  modified_base (3)..(3): 2'-O-methyl corresponding base
  modified_base (4)..(4): 2'-O-methyl corresponding base
  modified_base (5)..(5): 2'-hydroxy corresponding base
  modified_base (6)..(6): 2'-hydroxy corresponding base
  modified_base (7)..(7): 2'-O-methyl corresponding base
  modified_base (8)..(8): 2'-O-methyl corresponding base
  modified_base (9)..(9): 2'-hydroxy corresponding base
  modified_base (10)..(10): 2'-hydroxy corresponding base
  modified_base (11)..(11): 2'-hydroxy corresponding base
  modified_base (12)..(12): 2'-hydroxy corresponding base
  modified_base (13)..(13): 2'-O-methyl corresponding base
  modified_base (14)..(14): 2'-O-methyl corresponding base
  modified_base (15)..(15): 2'-O-methyl corresponding base
  modified_base (16)..(16): 2'-O-methyl corresponding base
  modified_base (17)..(17): 2'-hydroxy corresponding base
  modified_base (18)..(18): 2'-O-methyl corresponding base
  modified_base (19)..(19): 2'-hydroxy corresponding base
  modified_base (20)..(20): deoxythymidine
  modified_base (21)..(21): 5'-thio thymidine
ucccagccaggauuccgcgtt

SEQ ID NO: 30 - DNA, 21 bp, Artificial Sequence
  Description of Artificial Sequence: Synthetic oligonucleotide
  Description of Combined DNA/RNA Molecule: Synthetic oligonucleotide
  siRNAs to PCSK9
  modified_base (1)..(1): 2'-hydroxy corresponding base
  modified_base (2)..(2): 2'-hydroxy corresponding base
  modified_base (3)..(3): 2'-hydroxy corresponding base
  modified_base (4)..(4): 2'-hydroxy corresponding base
  modified_base (5)..(5): 2'-hydroxy corresponding base
  modified_base (6)..(6): 2'-hydroxy corresponding base
  modified_base (7)..(7): 2'-hydroxy corresponding base
  modified_base (8)..(8): 2'-hydroxy corresponding base
  modified_base (9)..(9): 2'-hydroxy corresponding base
  modified_base (10)..(10): 2'-hydroxy corresponding base
  modified_base (11)..(11): 2'-hydroxy corresponding base
  modified_base (12)..(12): 2'-hydroxy corresponding base
  modified_base (13)..(13): 2'-hydroxy corresponding base
  modified_base (14)..(14): 2'-hydroxy corresponding base
  modified_base (15)..(15): 2'-hydroxy corresponding base
  modified_base (16)..(16): 2'-hydroxy corresponding base
  modified_base (17)..(17): 2'-hydroxy corresponding base
  modified_base (18)..(18): 2'-hydroxy corresponding base
  modified_base (19)..(19): 2'-hydroxy corresponding base
  modified_base (20)..(20): deoxythymidine
  modified_base (21)..(21): 5'-thio thymidine
cgcggaauccuggcugggatt

SEQ ID NO: 31 - DNA, 21 bp, Artificial Sequence
  Description of Artificial Sequence: Synthetic oligonucleotide
  Description of Combined DNA/RNA Molecule: Synthetic oligonucleotide
  siRNAs to PCSK9
  modified_base (1)..(1): 2'-hydroxy corresponding base
  modified_base (2)..(2): 2'-hydroxy corresponding base
  modified_base (3)..(3): 2'-hydroxy corresponding base
  modified_base (4)..(4): 2'-hydroxy corresponding base
  modified_base (5)..(5): 2'-hydroxy corresponding base
  modified_base (6)..(6): 2'-hydroxy corresponding base
  modified_base (7)..(7): 2'-hydroxy corresponding base
  modified_base (8)..(8): 2'-hydroxy corresponding base
  modified_base (9)..(9): 2'-hydroxy corresponding base
  modified_base (10)..(10): 2'-hydroxy corresponding base
  modified_base (11)..(11): 2'-hydroxy corresponding base
  modified_base (12)..(12): 2'-hydroxy corresponding base
  modified_base (13)..(13): 2'-hydroxy corresponding base
  modified_base (14)..(14): 2'-hydroxy corresponding base
  modified_base (15)..(15): 2'-hydroxy corresponding base
  modified_base (16)..(16): 2'-hydroxy corresponding base
  modified_base (17)..(17): 2'-hydroxy corresponding base
  modified_base (18)..(18): 2'-hydroxy corresponding base
  modified_base (19)..(19): 2'-hydroxy corresponding base
  modified_base (20)..(20): deoxythymidine
  modified_base (21)..(21): 5'-thio thymidine
cccagccaggauuccgcgctt

SEQ ID NO: 32 - DNA, 21 bp, Artificial Sequence
  Description of Artificial Sequence: Synthetic oligonucleotide
  Description of Combined DNA/RNA Molecule: Synthetic oligonucleotide
  siRNAs to PCSK9
  modified_base (1)..(1): 2'-hydroxy corresponding base
  modified_base (2)..(2): 2'-hydroxy corresponding base
  modified_base (3)..(3): 2'-hydroxy corresponding base
  modified_base (4)..(4): 2'-hydroxy corresponding base
  modified_base (5)..(5): 2'-hydroxy corresponding base
  modified_base (6)..(6): 2'-hydroxy corresponding base
  modified_base (7)..(7): 2'-hydroxy corresponding base
  modified_base (8)..(8): 2'-hydroxy corresponding base
  modified_base (9)..(9): 2'-hydroxy corresponding base
  modified_base (10)..(10): 2'-hydroxy corresponding base
  modified_base (11)..(11): 2'-hydroxy corresponding base
  modified_base (12)..(12): 2'-hydroxy corresponding base
  modified_base (13)..(13): 2'-hydroxy corresponding base
  modified_base (14)..(14): 2'-hydroxy corresponding base
  modified_base (15)..(15): 2'-hydroxy corresponding base
  modified_base (16)..(16): 2'-hydroxy corresponding base
  modified_base (17)..(17): 2'-hydroxy corresponding base
  modified_base (18)..(18): 2'-hydroxy corresponding base
  modified_base (19)..(19): 2'-hydroxy corresponding base
  modified_base (20)..(20): deoxythymidine
  modified_base (21)..(21): 5'-thio thymidine
gcgcggaauccuggcugggtt

SEQ ID NO: 33 - DNA, 21 bp, Artificial Sequence
  Description of Artificial Sequence: Synthetic oligonucleotide
  Description of Combined DNA/RNA Molecule: Synthetic oligonucleotide
  siRNAs to PCSK9
  modified_base (1)..(1): 2'-O-methyl corresponding base
  modified_base (2)..(2): 2'-O-methyl corresponding base
  modified_base (3)..(3): 2'-O-methyl corresponding base
  modified_base (4)..(4): 2'-hydroxy corresponding base
  modified_base (5)..(5): 2'-hydroxy corresponding base
  modified_base (6)..(6): 2'-O-methyl corresponding base
  modified_base (7)..(7): 2'-O-methyl corresponding base
  modified_base (8)..(8): 2'-hydroxy corresponding base
  modified_base (9)..(9): 2'-hydroxy corresponding base
  modified_base (10)..(10): 2'-hydroxy corresponding base
  modified_base (11)..(11): 2'-hydroxy corresponding base
  modified_base (12)..(12): 2'-O-methyl corresponding base
  modified_base (13)..(13): 2'-O-methyl corresponding base
  modified_base (14)..(14): 2'-O-methyl corresponding base
  modified_base (15)..(15): 2'-O-methyl corresponding base
  modified_base (16)..(16): 2'-hydroxy corresponding base
  modified_base (17)..(17): 2'-O-methyl corresponding base
  modified_base (18)..(18): 2'-hydroxy corresponding base
  modified_base (19)..(19): 2'-O-methyl corresponding base
  modified_base (20)..(20): deoxythymidine
  modified_base (21)..(21): 5'-thio thymidine
cccagccaggauuccgcgctt

SEQ ID NO: 34 - DNA, 21 bp, Artificial Sequence
  Description of Artificial Sequence: Synthetic oligonucleotide
  Description of Combined DNA/RNA Molecule: Synthetic oligonucleotide
  siRNAs to PCSK9
  modified_base (1)..(1): 2'-hydroxy corresponding base
  modified_base (2)..(2): 2'-hydroxy corresponding base
  modified_base (3)..(3): 2'-hydroxy corresponding base
  modified_base (4)..(4): 2'-hydroxy corresponding base
  modified_base (5)..(5): 2'-hydroxy corresponding base
  modified_base (6)..(6): 2'-hydroxy corresponding base
  modified_base (7)..(7): 2'-hydroxy corresponding base
  modified_base (8)..(8): 2'-hydroxy corresponding base
  modified_base (9)..(9): 2'-hydroxy corresponding base
  modified_base (10)..(10): 2'-hydroxy corresponding base
  modified_base (11)..(11): 2'-hydroxy corresponding base
  modified_base (12)..(12): 2'-hydroxy corresponding base
  modified_base (13)..(13): 2'-hydroxy corresponding base
  modified_base (14)..(14): 2'-hydroxy corresponding base
  modified_base (15)..(15): 2'-hydroxy corresponding base
  modified_base (16)..(16): 2'-hydroxy corresponding base
  modified_base (17)..(17): 2'-hydroxy corresponding base
  modified_base (18)..(18): 2'-hydroxy corresponding base
  modified_base (19)..(19): 2'-hydroxy corresponding base
  modified_base (20)..(20): deoxythymidine
  modified_base (21)..(21): 5'-thio thymidine
gcgcggaauccuggcugggtt

SEQ ID NO: 35 - DNA, 21 bp, Artificial Sequence
  Description of Artificial Sequence: Synthetic oligonucleotide
  Description of Combined DNA/RNA Molecule: Synthetic oligonucleotide
  siRNAs to PCSK9
  modified_base (1)..(1): 2'-hydroxy corresponding base
  modified_base (2)..(2): 2'-hydroxy corresponding base
  modified_base (3)..(3): 2'-hydroxy corresponding base
  modified_base (4)..(4): 2'-hydroxy corresponding base
  modified_base (5)..(5): 2'-hydroxy corresponding base
  modified_base (6)..(6): 2'-hydroxy corresponding base
  modified_base (7)..(7): 2'-hydroxy corresponding base
  modified_base (8)..(8): 2'-hydroxy corresponding base
  modified_base (9)..(9): 2'-hydroxy corresponding base
  modified_base (10)..(10): 2'-hydroxy corresponding base
  modified_base (11)..(11): 2'-hydroxy corresponding base
  modified_base (12)..(12): 2'-hydroxy corresponding base
  modified_base (13)..(13): 2'-hydroxy corresponding base
  modified_base (14)..(14): 2'-hydroxy corresponding base
  modified_base (15)..(15): 2'-hydroxy corresponding base
  modified_base (16)..(16): 2'-hydroxy corresponding base
  modified_base (17)..(17): 2'-hydroxy corresponding base
  modified_base (18)..(18): 2'-hydroxy corresponding base
  modified_base (19)..(19): 2'-hydroxy corresponding base
  modified_base (20)..(20): deoxythymidine
  modified_base (21)..(21): 5'-thio thymidine
cagccaggauuccgcgcgctt

SEQ ID NO: 36 - DNA, 21 bp, Artificial Sequence
  Description of Artificial Sequence: Synthetic oligonucleotide
  Description of Combined DNA/RNA Molecule: Synthetic oligonucleotide
  siRNAs to PCSK9
  modified_base (1)..(1): 2'-hydroxy corresponding base
  modified_base (2)..(2): 2'-hydroxy corresponding base
  modified_base (3)..(3): 2'-hydroxy corresponding base
  modified_base (4)..(4): 2'-hydroxy corresponding base
  modified_base (5)..(5): 2'-hydroxy corresponding base
  modified_base (6)..(6): 2'-hydroxy corresponding base
  modified_base (7)..(7): 2'-hydroxy corresponding base
  modified_base (8)..(8): 2'-hydroxy corresponding base
  modified_base (9)..(9): 2'-hydroxy corresponding base
  modified_base (10)..(10): 2'-hydroxy corresponding base
  modified_base (11)..(11): 2'-hydroxy corresponding base
  modified_base (12)..(12): 2'-hydroxy corresponding base
  modified_base (13)..(13): 2'-hydroxy corresponding base
  modified_base (14)..(14): 2'-hydroxy corresponding base
  modified_base (15)..(15): 2'-hydroxy corresponding base
  modified_base (16)..(16): 2'-hydroxy corresponding base
  modified_base (17)..(17): 2'-hydroxy corresponding base
  modified_base (18)..(18): 2'-hydroxy corresponding base
  modified_base (19)..(19): 2'-hydroxy corresponding base
  modified_base (20)..(20): deoxythymidine
  modified_base (21)..(21): 5'-thio thymidine
gcgcgcggaauccuggcugtt

SEQ ID NO: 37 - DNA, 21 bp, Artificial Sequence
  Description of Artificial Sequence: Synthetic oligonucleotide
  Description of Combined DNA/RNA Molecule: Synthetic oligonucleotide
  siRNAs to PCSK9
  modified_base (1)..(1): 2'-O-methyl corresponding base
  modified_base (2)..(2): 2'-hydroxy corresponding base
  modified_base (3)..(3): 2'-hydroxy corresponding base
  modified_base (4)..(4): 2'-O-methyl corresponding base
  modified_base (5)..(5): 2'-O-methyl corresponding base
  modified_base (6)..(6): 2'-hydroxy corresponding base
  modified_base (7)..(7): 2'-hydroxy corresponding base
  modified_base (8)..(8): 2'-hydroxy corresponding base
  modified_base (9)..(9): 2'-hydroxy corresponding base
  modified_base (10)..(10): 2'-O-methyl corresponding base
  modified_base (11)..(11): 2'-O-methyl corresponding base
  modified_base (12)..(12): 2'-O-methyl corresponding base
  modified_base (13)..(13): 2'-O-methyl corresponding base
  modified_base (14)..(14): 2'-hydroxy corresponding base
  modified_base (15)..(15): 2'-O-methyl corresponding base
  modified_base (16)..(16): 2'-hydroxy corresponding base
  modified_base (17)..(17): 2'-O-methyl corresponding base
  modified_base (18)..(18): 2'-hydroxy corresponding base
  modified_base (19)..(19): 2'-O-methyl corresponding base
  modified_base (20)..(20): deoxythymidine
  modified_base (21)..(21): 5'-thio thymidine
cagccaggauuccgcgcgctt

SEQ ID NO: 38 - DNA, 21 bp, Artificial Sequence
  Description of Artificial Sequence: Synthetic oligonucleotide
  Description of Combined DNA/RNA Molecule: Synthetic oligonucleotide
  siRNAs to PCSK9
  modified_base (1)..(1): 2'-hydroxy corresponding base
  modified_base (2)..(2): 2'-hydroxy corresponding base
  modified_base (3)..(3): 2'-hydroxy corresponding base
  modified_base (4)..(4): 2'-hydroxy corresponding base
  modified_base (5)..(5): 2'-hydroxy corresponding base
  modified_base (6)..(6): 2'-hydroxy corresponding base
  modified_base (7)..(7): 2'-hydroxy corresponding base
  modified_base (8)..(8): 2'-hydroxy corresponding base
  modified_base (9)..(9): 2'-hydroxy corresponding base
  modified_base (10)..(10): 2'-hydroxy corresponding base
  modified_base (11)..(11): 2'-hydroxy corresponding base
  modified_base (12)..(12): 2'-hydroxy corresponding base
  modified_base (13)..(13): 2'-hydroxy corresponding base
  modified_base (14)..(14): 2'-hydroxy corresponding base
  modified_base (15)..(15): 2'-hydroxy corresponding base
  modified_base (16)..(16): 2'-hydroxy corresponding base
  modified_base (17)..(17): 2'-hydroxy corresponding base
  modified_base (18)..(18): 2'-hydroxy corresponding base
  modified_base (19)..(19): 2'-hydroxy corresponding base
  modified_base (20)..(20): deoxythymidine
  modified_base (21)..(21): 5'-thio thymidine
gcgcgcggaauccuggcugtt

SEQ ID NO: 39 - DNA, 21 bp, Artificial Sequence
  Description of Artificial Sequence: Synthetic oligonucleotide
  Description of Combined DNA/RNA Molecule: Synthetic oligonucleotide
  siRNAs to PCSK9
  modified_base (1)..(1): 2'-hydroxy corresponding base
  modified_base (2)..(2): 2'-hydroxy corresponding base
  modified_base (3)..(3): 2'-hydroxy corresponding base
  modified_base (4)..(4): 2'-hydroxy corresponding base
  modified_base (5)..(5): 2'-hydroxy corresponding base
  modified_base (6)..(6): 2'-hydroxy corresponding base
  modified_base (7)..(7): 2'-hydroxy corresponding base
  modified_base (8)..(8): 2'-hydroxy corresponding base
  modified_base (9)..(9): 2'-hydroxy corresponding base
  modified_base (10)..(10): 2'-hydroxy corresponding base
  modified_base (11)..(11): 2'-hydroxy corresponding base
  modified_base (12)..(12): 2'-hydroxy corresponding base
  modified_base (13)..(13): 2'-hydroxy corresponding base
  modified_base (14)..(14): 2'-hydroxy corresponding base
  modified_base (15)..(15): 2'-hydroxy corresponding base
  modified_base (16)..(16): 2'-hydroxy corresponding base
  modified_base (17)..(17): 2'-hydroxy corresponding base
  modified_base (18)..(18): 2'-hydroxy corresponding base
  modified_base (19)..(19): 2'-hydroxy corresponding base
  modified_base (20)..(20): deoxythymidine
  modified_base (21)..(21): 5'-thio thymidine
agcuccugcacaguccucctt

SEQ ID NO: 40 - DNA, 21 bp, Artificial Sequence
  Description of Artificial Sequence: Synthetic oligonucleotide
  Description of Combined DNA/RNA Molecule: Synthetic oligonucleotide
  siRNAs to PCSK9
  modified_base (1)..(1): 2'-hydroxy corresponding base
  modified_base (2)..(2): 2'-hydroxy corresponding base
  modified_base (3)..(3): 2'-hydroxy corresponding base
  modified_base (4)..(4): 2'-hydroxy corresponding base
  modified_base (5)..(5): 2'-hydroxy corresponding base
  modified_base (6)..(6): 2'-hydroxy corresponding base
  modified_base (7)..(7): 2'-hydroxy corresponding base
  modified_base (8)..(8): 2'-hydroxy corresponding base
  modified_base (9)..(9): 2'-hydroxy corresponding base
  modified_base (10)..(10): 2'-hydroxy corresponding base
  modified_base (11)..(11): 2'-hydroxy corresponding base
  modified_base (12)..(12): 2'-hydroxy corresponding base
  modified_base (13)..(13): 2'-hydroxy corresponding base
  modified_base (14)..(14): 2'-hydroxy corresponding base
  modified_base (15)..(15): 2'-hydroxy corresponding base
  modified_base (16)..(16): 2'-hydroxy corresponding base
  modified_base (17)..(17): 2'-hydroxy corresponding base
  modified_base (18)..(18): 2'-hydroxy corresponding base
  modified_base (19)..(19): 2'-hydroxy corresponding base
  modified_base (20)..(20): deoxythymidine
  modified_base (21)..(21): 5'-thio thymidine
ggaggacugugcaggagcutt

SEQ ID NO: 41 - DNA, 21 bp, Artificial Sequence
  Description of Artificial Sequence: Synthetic oligonucleotide
  Description of Combined DNA/RNA Molecule: Synthetic oligonucleotide
  siRNAs to PCSK9
  modified_base (1)..(1): 2'-hydroxy corresponding base
  modified_base (2)..(2): 2'-hydroxy corresponding base
  modified_base (3)..(3): 2'-O-methyl corresponding base
  modified_base (4)..(4): 2'-O-methyl corresponding base
  modified_base (5)..(5): 2'-O-methyl corresponding base
  modified_base (6)..(6): 2'-O-methyl corresponding base
  modified_base (7)..(7): 2'-O-methyl corresponding base
  modified_base (8)..(8): 2'-hydroxy corresponding base
  modified_base (9)..(9): 2'-O-methyl corresponding base
  modified_base (10)..(10): 2'-hydroxy corresponding base
  modified_base (11)..(11): 2'-O-methyl corresponding base
  modified_base (12)..(12): 2'-hydroxy corresponding base
  modified_base (13)..(13): 2'-hydroxy corresponding base
  modified_base (14)..(14): 2'-O-methyl corresponding base
  modified_base (15)..(15): 2'-O-methyl corresponding base
  modified_base (16)..(16): 2'-O-methyl corresponding base
  modified_base (17)..(17): 2'-O-methyl corresponding base
  modified_base (18)..(18): 2'-O-methyl corresponding base
  modified_base (19)..(19): 2'-O-methyl corresponding base
  modified_base (20)..(20): deoxythymidine
  modified_base (21)..(21): 5'-thio thymidine
agcuccugcacaguccucctt

SEQ ID NO: 42 - DNA, 21 bp, Artificial Sequence
  Description of Artificial Sequence: Synthetic oligonucleotide
  Description of Combined DNA/RNA Molecule: Synthetic oligonucleotide
  siRNAs to PCSK9
  modified_base (1)..(1): 2'-hydroxy corresponding base
  modified_base (2)..(2): 2'-hydroxy corresponding base
  modified_base (3)..(3): 2'-hydroxy corresponding base
  modified_base (4)..(4): 2'-hydroxy corresponding base
  modified_base (5)..(5): 2'-hydroxy corresponding base
  modified_base (6)..(6): 2'-hydroxy corresponding base
  modified_base (7)..(7): 2'-hydroxy corresponding base
  modified_base (8)..(8): 2'-hydroxy corresponding base
  modified_base (9)..(9): 2'-hydroxy corresponding base
  modified_base (10)..(10): 2'-hydroxy corresponding base
  modified_base (11)..(11): 2'-hydroxy corresponding base
  modified_base (12)..(12): 2'-O-methyl corresponding base
  modified_base (13)..(13): 2'-hydroxy corresponding base
  modified_base (14)..(14): 2'-hydroxy corresponding base
  modified_base (15)..(15): 2'-hydroxy corresponding base
  modified_base (16)..(16): 2'-hydroxy corresponding base
  modified_base (17)..(17): 2'-hydroxy corresponding base
  modified_base (18)..(18): 2'-hydroxy corresponding base
  modified_base (19)..(19): 2'-hydroxy corresponding base
  modified_base (20)..(20): deoxythymidine
  modified_base (21)..(21): 5'-thio thymidine
ggaggacugugcaggagcutt

SEQ ID NO: 43 - DNA, 21 bp, Artificial Sequence
  Description of Artificial Sequence: Synthetic oligonucleotide
  Description of Combined DNA/RNA Molecule: Synthetic oligonucleotide
  siRNAs to PCSK9
  modified_base (1)..(1): 2'-hydroxy corresponding base
  modified_base (2)..(2): 2'-hydroxy corresponding base
  modified_base (3)..(3): 2'-hydroxy corresponding base
  modified_base (4)..(4): 2'-hydroxy corresponding base
  modified_base (5)..(5): 2'-hydroxy corresponding base
  modified_base (6)..(6): 2'-hydroxy corresponding base
  modified_base (7)..(7): 2'-hydroxy corresponding base
  modified_base (8)..(8): 2'-hydroxy corresponding base
  modified_base (9)..(9): 2'-hydroxy corresponding base
  modified_base (10)..(10): 2'-hydroxy corresponding base
  modified_base (11)..(11): 2'-hydroxy corresponding base
  modified_base (12)..(12): 2'-hydroxy corresponding base
  modified_base (13)..(13): 2'-hydroxy corresponding base
  modified_base (14)..(14): 2'-hydroxy corresponding base
  modified_base (15)..(15): 2'-hydroxy corresponding base
  modified_base (16)..(16): 2'-hydroxy corresponding base
  modified_base (17)..(17): 2'-hydroxy corresponding base
  modified_base (18)..(18): 2'-hydroxy corresponding base
  modified_base (19)..(19): 2'-hydroxy corresponding base
  modified_base (20)..(20): deoxythymidine
  modified_base (21)..(21): deoxythymidine
caccgcaaggcucaaggcgtt

SEQ ID NO: 44 - DNA, 21 bp, Artificial Sequence
  Description of Artificial Sequence: Synthetic oligonucleotide
  Description of Combined DNA/RNA Molecule: Synthetic oligonucleotide
  siRNAs to PCSK9
  modified_base (1)..(1): 2'-hydroxy corresponding base
  modified_base (2)..(2): 2'-hydroxy corresponding base
  modified_base (3)..(3): 2'-hydroxy corresponding base
  modified_base (4)..(4): 2'-hydroxy corresponding base
  modified_base (5)..(5): 2'-hydroxy corresponding base
  modified_base (6)..(6): 2'-hydroxy corresponding base
  modified_base (7)..(7): 2'-hydroxy corresponding base
  modified_base (8)..(8): 2'-hydroxy corresponding base
  modified_base (9)..(9): 2'-hydroxy corresponding base
  modified_base (10)..(10): 2'-hydroxy corresponding base
  modified_base (11)..(11): 2'-hydroxy corresponding base
  modified_base (12)..(12): 2'-hydroxy corresponding base
  modified_base (13)..(13): 2'-hydroxy corresponding base
  modified_base (14)..(14): 2'-hydroxy corresponding base
  modified_base (15)..(15): 2'-hydroxy corresponding base
  modified_base (16)..(16): 2'-hydroxy corresponding base
  modified_base (17)..(17): 2'-hydroxy corresponding base
  modified_base (18)..(18): 2'-hydroxy corresponding base
  modified_base (19)..(19): 2'-hydroxy corresponding base
  modified_base (20)..(20): deoxythymidine
  modified_base (21)..(21): deoxythymidine
cgccuugagccuugcggugtt

SEQ ID NO: 45 - DNA, 21 bp, Artificial Sequence
  Description of Artificial Sequence: Synthetic oligonucleotide
  Description of Combined DNA/RNA Molecule: Synthetic oligonucleotide
  siRNAs to PCSK9
  modified_base (1)..(1): 2'-hydroxy corresponding base
  modified_base (2)..(2): 2'-hydroxy corresponding base
  modified_base (3)..(3): 2'-hydroxy corresponding base
  modified_base (4)..(4): 2'-hydroxy corresponding base
  modified_base (5)..(5): 2'-hydroxy corresponding base
  modified_base (6)..(6): 2'-hydroxy corresponding base
  modified_base (7)..(7): 2'-hydroxy corresponding base
  modified_base (8)..(8): 2'-hydroxy corresponding base
  modified_base (9)..(9): 2'-hydroxy corresponding base
  modified_base (10)..(10): 2'-hydroxy corresponding base
  modified_base (11)..(11): 2'-hydroxy corresponding base
  modified_base (12)..(12): 2'-hydroxy corresponding base
  modified_base (13)..(13): 2'-hydroxy corresponding base
  modified_base (14)..(14): 2'-hydroxy corresponding base
  modified_base (15)..(15): 2'-hydroxy corresponding base
  modified_base (16)..(16): 2'-hydroxy corresponding base
  modified_base (17)..(17): 2'-hydroxy corresponding base
  modified_base (18)..(18): 2'-hydroxy corresponding base
  modified_base (19)..(19): 2'-hydroxy corresponding base
  modified_base (20)..(20): deoxythymidine
  modified_base (21)..(21): deoxythymidine
cgcaaggcucaaggcgccgtt

SEQ ID NO: 46 - DNA, 21 bp, Artificial Sequence
  Description of Artificial Sequence: Synthetic oligonucleotide
  Description of Combined DNA/RNA Molecule: Synthetic oligonucleotide
  siRNAs to PCSK9
  modified_base (1)..(1): 2'-hydroxy corresponding base
  modified_base (2)..(2): 2'-hydroxy corresponding base
  modified_base (3)..(3): 2'-hydroxy corresponding base
  modified_base (4)..(4): 2'-hydroxy corresponding base
  modified_base (5)..(5): 2'-hydroxy corresponding base
  modified_base (6)..(6): 2'-hydroxy corresponding base
  modified_base (7)..(7): 2'-hydroxy corresponding base
  modified_base (8)..(8): 2'-hydroxy corresponding base
  modified_base (9)..(9): 2'-hydroxy corresponding base
  modified_base (10)..(10): 2'-hydroxy corresponding base
  modified_base (11)..(11): 2'-hydroxy corresponding base
  modified_base (12)..(12): 2'-hydroxy corresponding base
  modified_base (13)..(13): 2'-hydroxy corresponding base
  modified_base (14)..(14): 2'-hydroxy corresponding base
  modified_base (15)..(15): 2'-hydroxy corresponding base
  modified_base (16)..(16): 2'-hydroxy corresponding base
  modified_base (17)..(17): 2'-hydroxy corresponding base
  modified_base (18)..(18): 2'-hydroxy corresponding base
  modified_base (19)..(19): 2'-hydroxy corresponding base
  modified_base (20)..(20): deoxythymidine
  modified_base (21)..(21): deoxythymidine
cggcgccuugagccuugcgtt

SEQ ID NO: 47 - DNA, 21 bp, Artificial Sequence
  Description of Artificial Sequence: Synthetic oligonucleotide
  Description of Combined DNA/RNA Molecule: Synthetic oligonucleotide
  siRNAs to PCSK9
  modified_base (1)..(1): 2'-hydroxy corresponding base
  modified_base (2)..(2): 2'-hydroxy corresponding base
  modified_base (3)..(3): 2'-hydroxy corresponding base
  modified_base (4)..(4): 2'-hydroxy corresponding base
  modified_base (5)..(5): 2'-hydroxy corresponding base
  modified_base (6)..(6): 2'-hydroxy corresponding base
  modified_base (7)..(7): 2'-hydroxy corresponding base
  modified_base (8)..(8): 2'-hydroxy corresponding base
  modified_base (9)..(9): 2'-hydroxy corresponding base
  modified_base (10)..(10): 2'-hydroxy corresponding base
  modified_base (11)..(11): 2'-hydroxy corresponding base
  modified_base (12)..(12): 2'-hydroxy corresponding base
  modified_base (13)..(13): 2'-hydroxy corresponding base
  modified_base (14)..(14): 2'-hydroxy corresponding base
  modified_base (15)..(15): 2'-hydroxy corresponding base
  modified_base (16)..(16): 2'-hydroxy corresponding base
  modified_base (17)..(17): 2'-hydroxy corresponding base
  modified_base (18)..(18): 2'-hydroxy corresponding base
  modified_base (19)..(19): 2'-hydroxy corresponding base
  modified_base (20)..(20): deoxythymidine
  modified_base (21)..(21): deoxythymidine
caaggcucaaggcgccgcctt

SEQ ID NO: 48 - DNA, 21 bp, Artificial Sequence
  Description of Artificial Sequence: Synthetic oligonucleotide
  Description of Combined DNA/RNA Molecule: Synthetic oligonucleotide
  siRNAs to PCSK9
  modified_base (1)..(1): 2'-hydroxy corresponding base
  modified_base (2)..(2): 2'-hydroxy corresponding base
  modified_base (3)..(3): 2'-hydroxy corresponding base
  modified_base (4)..(4): 2'-hydroxy corresponding base
  modified_base (5)..(5): 2'-hydroxy corresponding base
  modified_base (6)..(6): 2'-hydroxy corresponding base
  modified_base (7)..(7): 2'-hydroxy corresponding base
  modified_base (8)..(8): 2'-hydroxy corresponding base
  modified_base (9)..(9): 2'-hydroxy corresponding base
  modified_base (10)..(10): 2'-hydroxy corresponding base
  modified_base (11)..(11): 2'-hydroxy corresponding base
  modified_base (12)..(12): 2'-hydroxy corresponding base
  modified_base (13)..(13): 2'-hydroxy corresponding base
  modified_base (14)..(14): 2'-hydroxy corresponding base
  modified_base (15)..(15): 2'-hydroxy corresponding base
  modified_base (16)..(16): 2'-hydroxy corresponding base
  modified_base (17)..(17): 2'-hydroxy corresponding base
  modified_base (18)..(18): 2'-hydroxy corresponding base
  modified_base (19)..(19): 2'-hydroxy corresponding base
  modified_base (20)..(20): deoxythymidine
  modified_base (21)..(21): deoxythymidine
ggcggcgccuugagccuugtt

SEQ ID NO: 49 - DNA, 21 bp, Artificial Sequence
  Description of Artificial Sequence: Synthetic oligonucleotide
  Description of Combined DNA/RNA Molecule: Synthetic oligonucleotide
  siRNAs to PCSK9
  modified_base (1)..(1): 2'-hydroxy corresponding base
  modified_base (2)..(2): 2'-hydroxy corresponding base
  modified_base (3)..(3): 2'-hydroxy corresponding base
  modified_base (4)..(4): 2'-hydroxy corresponding base
  modified_base (5)..(5): 2'-hydroxy corresponding base
  modified_base (6)..(6): 2'-hydroxy corresponding base
  modified_base (7)..(7): 2'-hydroxy corresponding base
  modified_base (8)..(8): 2'-hydroxy corresponding base
  modified_base (9)..(9): 2'-hydroxy corresponding base
  modified_base (10)..(10): 2'-hydroxy corresponding base
  modified_base (11)..(11): 2'-hydroxy corresponding base
  modified_base (12)..(12): 2'-hydroxy corresponding base
  modified_base (13)..(13): 2'-hydroxy corresponding base
  modified_base (14)..(14): 2'-hydroxy corresponding base
  modified_base (15)..(15): 2'-hydroxy corresponding base
  modified_base (16)..(16): 2'-hydroxy corresponding base
  modified_base (17)..(17): 2'-hydroxy corresponding base
  modified_base (18)..(18): 2'-hydroxy corresponding base
  modified_base (19)..(19): 2'-hydroxy corresponding base
  modified_base (20)..(20): deoxythymidine
  modified_base (21)..(21): deoxythymidine
guggaccgcgcacggccuctt

SEQ ID NO: 50 - DNA, 21 bp, Artificial Sequence
  Description of Artificial Sequence: Synthetic oligonucleotide
  Description of Combined DNA/RNA Molecule: Synthetic oligonucleotide
  siRNAs to PCSK9
  modified_base (1)..(1): 2'-hydroxy corresponding base
  modified_base (2)..(2): 2'-hydroxy corresponding base
  modified_base (3)..(3): 2'-hydroxy corresponding base
  modified_base (4)..(4): 2'-hydroxy corresponding base
  modified_base (5)..(5): 2'-hydroxy corresponding base
  modified_base (6)..(6): 2'-hydroxy corresponding base
  modified_base (7)..(7): 2'-hydroxy corresponding base
  modified_base (8)..(8): 2'-hydroxy corresponding base
  modified_base (9)..(9): 2'-hydroxy corresponding base
  modified_base (10)..(10): 2'-hydroxy corresponding base
  modified_base (11)..(11): 2'-hydroxy corresponding base
  modified_base (12)..(12): 2'-hydroxy corresponding base
  modified_base (13)..(13): 2'-hydroxy corresponding base
  modified_base (14)..(14): 2'-hydroxy corresponding base
  modified_base (15)..(15): 2'-hydroxy corresponding base
  modified_base (16)..(16): 2'-hydroxy corresponding base
  modified_base (17)..(17): 2'-hydroxy corresponding base
  modified_base (18)..(18): 2'-hydroxy corresponding base
  modified_base (19)..(19): 2'-hydroxy corresponding base
  modified_base (20)..(20): deoxythymidine
  modified_base (21)..(21): deoxythymidine
gaggccgugcgcgguccactt

SEQ ID NO: 51 - DNA, 21 bp, Artificial Sequence
  Description of Artificial Sequence: Synthetic oligonucleotide
  Description of Combined DNA/RNA Molecule: Synthetic oligonucleotide
  siRNAs to PCSK9
  modified_base (1)..(1): 2'-hydroxy corresponding base
  modified_base (2)..(2): 2'-hydroxy corresponding base
  modified_base (3)..(3): 2'-hydroxy corresponding base
  modified_base (4)..(4): 2'-hydroxy corresponding base
  modified_base (5)..(5): 2'-hydroxy corresponding base
  modified_base (6)..(6): 2'-hydroxy corresponding base
  modified_base (7)..(7): 2'-hydroxy corresponding base
  modified_base (8)..(8): 2'-hydroxy corresponding base
  modified_base (9)..(9): 2'-hydroxy corresponding base
  modified_base (10)..(10): 2'-hydroxy corresponding base
  modified_base (11)..(11): 2'-hydroxy corresponding base
  modified_base (12)..(12): 2'-hydroxy corresponding base
  modified_base (13)..(13): 2'-hydroxy corresponding base
  modified_base (14)..(14): 2'-hydroxy corresponding base
  modified_base (15)..(15): 2'-hydroxy corresponding base
  modified_base (16)..(16): 2'-hydroxy corresponding base
  modified_base (17)..(17): 2'-hydroxy corresponding base
  modified_base (18)..(18): 2'-hydroxy corresponding base
  modified_base (19)..(19): 2'-hydroxy corresponding base
  modified_base (20)..(20): deoxythymidine
  modified_base (21)..(21): deoxythymidine
uggaccgcgcacggccucutt

SEQ ID NO: 52 - DNA, 21 bp, Artificial Sequence
  Description of Artificial Sequence: Synthetic oligonucleotide
  Description of Combined DNA/RNA Molecule: Synthetic oligonucleotide
  siRNAs to PCSK9
  modified_base (1)..(1): 2'-hydroxy corresponding base
  modified_base (2)..(2): 2'-hydroxy corresponding base
  modified_base (3)..(3): 2'-hydroxy corresponding base
  modified_base (4)..(4): 2'-hydroxy corresponding base
  modified_base (5)..(5): 2'-hydroxy corresponding base
  modified_base (6)..(6): 2'-hydroxy corresponding base
  modified_base (7)..(7): 2'-hydroxy corresponding base
  modified_base (8)..(8): 2'-hydroxy corresponding base
  modified_base (9)..(9): 2'-hydroxy corresponding base
  modified_base (10)..(10): 2'-hydroxy corresponding base
  modified_base (11)..(11): 2'-hydroxy corresponding base
  modified_base (12)..(12): 2'-hydroxy corresponding base
  modified_base (13)..(13): 2'-hydroxy corresponding base
  modified_base (14)..(14): 2'-hydroxy corresponding base
  modified_base (15)..(15): 2'-hydroxy corresponding base
  modified_base (16)..(16): 2'-hydroxy corresponding base
  modified_base (17)..(17): 2'-hydroxy corresponding base
  modified_base (18)..(18): 2'-hydroxy corresponding base
  modified_base (19)..(19): 2'-hydroxy corresponding base
  modified_base (20)..(20): deoxythymidine
  modified_base (21)..(21): deoxythymidine
agaggccgugcgcgguccatt

SEQ ID NO: 53 - DNA, 21 bp, Artificial Sequence
  Description of Artificial Sequence: Synthetic oligonucleotide
  Description of Combined DNA/RNA Molecule: Synthetic oligonucleotide
  siRNAs to PCSK9
  modified_base (1)..(1): 2'-hydroxy corresponding base
  modified_base (2)..(2): 2'-hydroxy corresponding base
  modified_base (3)..(3): 2'-hydroxy corresponding base
  modified_base (4)..(4): 2'-hydroxy corresponding base
  modified_base (5)..(5): 2'-hydroxy corresponding base
  modified_base (6)..(6): 2'-hydroxy corresponding base
  modified_base (7)..(7): 2'-hydroxy corresponding base
  modified_base (8)..(8): 2'-hydroxy corresponding base
  modified_base (9)..(9): 2'-hydroxy corresponding base
  modified_base (10)..(10): 2'-hydroxy corresponding base
  modified_base (11)..(11): 2'-hydroxy corresponding base
  modified_base (12)..(12): 2'-hydroxy corresponding base
  modified_base (13)..(13): 2'-hydroxy corresponding base
  modified_base (14)..(14): 2'-hydroxy corresponding base
  modified_base (15)..(15): 2'-hydroxy corresponding base
  modified_base (16)..(16): 2'-hydroxy corresponding base
  modified_base (17)..(17): 2'-hydroxy corresponding base
  modified_base (18)..(18): 2'-hydroxy corresponding base
  modified_base (19)..(19): 2'-hydroxy corresponding base
  modified_base (20)..(20): deoxythymidine
  modified_base (21)..(21): deoxythymidine
ggaccgcgcacggccucuatt

SEQ ID NO: 54 - DNA, 21 bp, Artificial Sequence
  Description of Artificial Sequence: Synthetic oligonucleotide
  Description of Combined DNA/RNA Molecule: Synthetic oligonucleotide
  siRNAs to PCSK9
  modified_base (1)..(1): 2'-hydroxy corresponding base
  modified_base (2)..(2): 2'-hydroxy corresponding base
  modified_base (3)..(3): 2'-hydroxy corresponding base
  modified_base (4)..(4): 2'-hydroxy corresponding base
  modified_base (5)..(5): 2'-hydroxy corresponding base
  modified_base (6)..(6): 2'-hydroxy corresponding base
  modified_base (7)..(7): 2'-hydroxy corresponding base
  modified_base (8)..(8): 2'-hydroxy corresponding base
  modified_base (9)..(9): 2'-hydroxy corresponding base
  modified_base (10)..(10): 2'-hydroxy corresponding base
  modified_base (11)..(11): 2'-hydroxy corresponding base
  modified_base (12)..(12): 2'-hydroxy corresponding base
  modified_base (13)..(13): 2'-hydroxy corresponding base
  modified_base (14)..(14): 2'-hydroxy corresponding base
  modified_base (15)..(15): 2'-hydroxy corresponding base
  modified_base (16)..(16): 2'-hydroxy corresponding base
  modified_base (17)..(17): 2'-hydroxy corresponding base
  modified_base (18)..(18): 2'-hydroxy corresponding base
  modified_base (19)..(19): 2'-hydroxy corresponding base
  modified_base (20)..(20): deoxythymidine
  modified_base (21)..(21): deoxythymidine
uagaggccgugcgcggucctt

SEQ ID NO: 55 - DNA, 21 bp, Artificial Sequence
  Description of Artificial Sequence: Synthetic oligonucleotide
  Description of Combined DNA/RNA Molecule: Synthetic oligonucleotide
  siRNAs to PCSK9
  modified_base (1)..(1): 2'-hydroxy corresponding base
  modified_base (2)..(2): 2'-hydroxy corresponding base
  modified_base (3)..(3): 2'-hydroxy corresponding base
  modified_base (4)..(4): 2'-hydroxy corresponding base
  modified_base (5)..(5): 2'-hydroxy corresponding base
  modified_base (6)..(6): 2'-hydroxy corresponding base
  modified_base (7)..(7): 2'-hydroxy corresponding base
  modified_base (8)..(8): 2'-hydroxy corresponding base
  modified_base (9)..(9): 2'-hydroxy corresponding base
  modified_base (10)..(10): 2'-hydroxy corresponding base
  modified_base (11)..(11): 2'-hydroxy corresponding base
  modified_base (12)..(12): 2'-hydroxy corresponding base
  modified_base (13)..(13): 2'-hydroxy corresponding base
  modified_base (14)..(14): 2'-hydroxy corresponding base
  modified_base (15)..(15): 2'-hydroxy corresponding base
  modified_base (16)..(16): 2'-hydroxy corresponding base
  modified_base (17)..(17): 2'-hydroxy corresponding base
  modified_base (18)..(18): 2'-hydroxy corresponding base
  modified_base (19)..(19): 2'-hydroxy corresponding base
  modified_base (20)..(20): deoxythymidine
  modified_base (21)..(21): deoxythymidine
gaccgcgcacggccucuagtt

SEQ ID NO: 56 - DNA, 21 bp, Artificial Sequence
  Description of Artificial Sequence: Synthetic oligonucleotide
  Description of Combined DNA/RNA Molecule: Synthetic oligonucleotide
  siRNAs to PCSK9
  modified_base (1)..(1): 2'-hydroxy corresponding base
  modified_base (2)..(2): 2'-hydroxy corresponding base
  modified_base (3)..(3): 2'-hydroxy corresponding base
  modified_base (4)..(4): 2'-hydroxy corresponding base
  modified_base (5)..(5): 2'-hydroxy corresponding base
  modified_base (6)..(6): 2'-hydroxy corresponding base
  modified_base (7)..(7): 2'-hydroxy corresponding base
  modified_base (8)..(8): 2'-hydroxy corresponding base
  modified_base (9)..(9): 2'-hydroxy corresponding base
  modified_base (10)..(10): 2'-hydroxy corresponding base
  modified_base (11)..(11): 2'-hydroxy corresponding base
  modified_base (12)..(12): 2'-hydroxy corresponding base
  modified_base (13)..(13): 2'-hydroxy corresponding base
  modified_base (14)..(14): 2'-hydroxy corresponding base
  modified_base (15)..(15): 2'-hydroxy corresponding base
  modified_base (16)..(16): 2'-hydroxy corresponding base
  modified_base (17)..(17): 2'-hydroxy corresponding base
  modified_base (18)..(18): 2'-hydroxy corresponding base
  modified_base (19)..(19): 2'-hydroxy corresponding base
  modified_base (20)..(20): deoxythymidine
  modified_base (21)..(21): deoxythymidine
cuagaggccgugcgcgguctt

SEQ ID NO: 57 - DNA, 21 bp, Artificial Sequence
  Description of Artificial Sequence: Synthetic oligonucleotide
  Description of Combined DNA/RNA Molecule: Synthetic oligonucleotide
  siRNAs to PCSK9
  modified_base (1)..(1): 2'-hydroxy corresponding base
  modified_base (2)..(2): 2'-hydroxy corresponding base
  modified_base (3)..(3): 2'-hydroxy corresponding base
  modified_base (4)..(4): 2'-hydroxy corresponding base
  modified_base (5)..(5): 2'-hydroxy corresponding base
  modified_base (6)..(6): 2'-hydroxy corresponding base
  modified_base (7)..(7): 2'-hydroxy corresponding base
  modified_base (8)..(8): 2'-hydroxy corresponding base
  modified_base (9)..(9): 2'-hydroxy corresponding base
  modified_base (10)..(10): 2'-hydroxy corresponding base
  modified_base (11)..(11): 2'-hydroxy corresponding base
  modified_base (12)..(12): 2'-hydroxy corresponding base
  modified_base (13)..(13): 2'-hydroxy corresponding base
  modified_base (14)..(14): 2'-hydroxy corresponding base
  modified_base (15)..(15): 2'-hydroxy corresponding base
  modified_base (16)..(16): 2'-hydroxy corresponding base
  modified_base (17)..(17): 2'-hydroxy corresponding base
  modified_base (18)..(18): 2'-hydroxy corresponding base
  modified_base (19)..(19): 2'-hydroxy corresponding base
  modified_base (20)..(20): deoxythymidine
  modified_base (21)..(21): deoxythymidine
accgcgcacggccucuaggtt

SEQ ID NO: 58 - DNA, 21 bp, Artificial Sequence
  Description of Artificial Sequence: Synthetic oligonucleotide
  Description of Combined DNA/RNA Molecule: Synthetic oligonucleotide
  siRNAs to PCSK9
  modified_base (1)..(1): 2'-hydroxy corresponding base
  modified_base (2)..(2): 2'-hydroxy corresponding base
  modified_base (3)..(3): 2'-hydroxy corresponding base
  modified_base (4)..(4): 2'-hydroxy corresponding base
  modified_base (5)..(5): 2'-hydroxy corresponding base
  modified_base (6)..(6): 2'-hydroxy corresponding base
  modified_base (7)..(7): 2'-hydroxy corresponding base
  modified_base (8)..(8): 2'-hydroxy corresponding base
  modified_base (9)..(9): 2'-hydroxy corresponding base
  modified_base (10)..(10): 2'-hydroxy corresponding base
  modified_base (11)..(11): 2'-hydroxy corresponding base
  modified_base (12)..(12): 2'-hydroxy corresponding base
  modified_base (13)..(13): 2'-hydroxy corresponding base
  modified_base (14)..(14): 2'-hydroxy corresponding base
  modified_base (15)..(15): 2'-hydroxy corresponding base
  modified_base (16)..(16): 2'-hydroxy corresponding base
  modified_base (17)..(17): 2'-hydroxy corresponding base
  modified_base (18)..(18): 2'-hydroxy corresponding base
  modified_base (19)..(19): 2'-hydroxy corresponding base
  modified_base (20)..(20): deoxythymidine
  modified_base (21)..(21): deoxythymidine
ccuagaggccgugcgcggutt

SEQ ID NO: 59 - DNA, 21 bp, Artificial Sequence
  Description of Artificial Sequence: Synthetic oligonucleotide
  Description of Combined DNA/RNA Molecule: Synthetic oligonucleotide
  siRNAs to PCSK9
  modified_base (1)..(1): 2'-hydroxy corresponding base
  modified_base (2)..(2): 2'-hydroxy corresponding base
  modified_base (3)..(3): 2'-hydroxy corresponding base
  modified_base (4)..(4): 2'-hydroxy corresponding base
  modified_base (5)..(5): 2'-hydroxy corresponding base
  modified_base (6)..(6): 2'-hydroxy corresponding base
  modified_base (7)..(7): 2'-hydroxy corresponding base
  modified_base (8)..(8): 2'-hydroxy corresponding base
  modified_base (9)..(9): 2'-hydroxy corresponding base
  modified_base (10)..(10): 2'-hydroxy corresponding base
  modified_base (11)..(11): 2'-hydroxy corresponding base
  modified_base (12)..(12): 2'-hydroxy corresponding base
  modified_base (13)..(13): 2'-hydroxy corresponding base
  modified_base (14)..(14): 2'-hydroxy corresponding base
  modified_base (15)..(15): 2'-hydroxy corresponding base
  modified_base (16)..(16): 2'-hydroxy corresponding base
  modified_base (17)..(17): 2'-hydroxy corresponding base
  modified_base (18)..(18): 2'-hydroxy corresponding base
  modified_base (19)..(19): 2'-hydroxy corresponding base
  modified_base (20)..(20): deoxythymidine
  modified_base (21)..(21): deoxythymidine
ccgcgcacggccucuaggutt

SEQ ID NO: 60 - DNA, 21 bp, Artificial Sequence
  Description of Artificial Sequence: Synthetic oligonucleotide
  Description of Combined DNA/RNA Molecule: Synthetic oligonucleotide
  siRNAs to PCSK9
  modified_base (1)..(1): 2'-hydroxy corresponding base
  modified_base (2)..(2): 2'-hydroxy corresponding base
  modified_base (3)..(3): 2'-hydroxy corresponding base
  modified_base (4)..(4): 2'-hydroxy corresponding base
  modified_base (5)..(5): 2'-hydroxy corresponding base
  modified_base (6)..(6): 2'-hydroxy corresponding base
  modified_base (7)..(7): 2'-hydroxy corresponding base
  modified_base (8)..(8): 2'-hydroxy corresponding base
  modified_base (9)..(9): 2'-hydroxy corresponding base
  modified_base (10)..(10): 2'-hydroxy corresponding base
  modified_base (11)..(11): 2'-hydroxy corresponding base
  modified_base (12)..(12): 2'-hydroxy corresponding base
  modified_base (13)..(13): 2'-hydroxy corresponding base
  modified_base (14)..(14): 2'-hydroxy corresponding base
  modified_base (15)..(15): 2'-hydroxy corresponding base
  modified_base (16)..(16): 2'-hydroxy corresponding base
  modified_base (17)..(17): 2'-hydroxy corresponding base
  modified_base (18)..(18): 2'-hydroxy corresponding base
  modified_base (19)..(19): 2'-hydroxy corresponding base
  modified_base (20)..(20): deoxythymidine
  modified_base (21)..(21): deoxythymidine
accuagaggccgugcgcggtt

SEQ ID NO: 61 - DNA, 21 bp, Artificial Sequence
  Description of Artificial Sequence: Synthetic oligonucleotide
  Description of Combined DNA/RNA Molecule: Synthetic oligonucleotide
  siRNAs to PCSK9
  modified_base (1)..(1): 2'-hydroxy corresponding base
  modified_base (2)..(2): 2'-hydroxy corresponding base
  modified_base (3)..(3): 2'-hydroxy corresponding base
  modified_base (4)..(4): 2'-hydroxy corresponding base
  modified_base (5)..(5): 2'-hydroxy corresponding base
  modified_base (6)..(6): 2'-hydroxy corresponding base
  modified_base (7)..(7): 2'-hydroxy corresponding base
  modified_base (8)..(8): 2'-hydroxy corresponding base
  modified_base (9)..(9): 2'-hydroxy corresponding base
  modified_base (10)..(10): 2'-hydroxy corresponding base
  modified_base (11)..(11): 2'-hydroxy corresponding base
  modified_base (12)..(12): 2'-hydroxy corresponding base
  modified_base (13)..(13): 2'-hydroxy corresponding base
  modified_base (14)..(14): 2'-hydroxy corresponding base
  modified_base (15)..(15): 2'-hydroxy corresponding base
  modified_base (16)..(16): 2'-hydroxy corresponding base
  modified_base (17)..(17): 2'-hydroxy corresponding base
  modified_base (18)..(18): 2'-hydroxy corresponding base
  modified_base (19)..(19): 2'-hydroxy corresponding base
  modified_base (20)..(20): deoxythymidine
  modified_base (21)..(21): deoxythymidine
cgcgcacggccucuagguctt

SEQ ID NO: 62 - DNA, 21 bp, Artificial Sequence
  Description of Artificial Sequence: Synthetic oligonucleotide
  Description of Combined DNA/RNA Molecule: Synthetic oligonucleotide
  siRNAs to PCSK9
  modified_base (1)..(1): 2'-hydroxy corresponding base
  modified_base (2)..(2): 2'-hydroxy corresponding base
  modified_base (3)..(3): 2'-hydroxy corresponding base
  modified_base (4)..(4): 2'-hydroxy corresponding base
  modified_base (5)..(5): 2'-hydroxy corresponding base
  modified_base (6)..(6): 2'-hydroxy corresponding base
  modified_base (7)..(7): 2'-hydroxy corresponding base
  modified_base (8)..(8): 2'-hydroxy corresponding base
  modified_base (9)..(9): 2'-hydroxy corresponding base
  modified_base (10)..(10): 2'-hydroxy corresponding base
  modified_base (11)..(11): 2'-hydroxy corresponding base
  modified_base (12)..(12): 2'-hydroxy corresponding base
  modified_base (13)..(13): 2'-hydroxy corresponding base
  modified_base (14)..(14): 2'-hydroxy corresponding base
  modified_base (15)..(15): 2'-hydroxy corresponding base
  modified_base (16)..(16): 2'-hydroxy corresponding base
  modified_base (17)..(17): 2'-hydroxy corresponding base
  modified_base (18)..(18): 2'-hydroxy corresponding base
  modified_base (19)..(19): 2'-hydroxy corresponding base
  modified_base (20)..(20): deoxythymidine
  modified_base (21)..(21): deoxythymidine
gaccuagaggccgugcgcgtt

SEQ ID NO: 63 - DNA, 21 bp, Artificial Sequence
  Description of Artificial Sequence: Synthetic oligonucleotide
  Description of Combined DNA/RNA Molecule: Synthetic oligonucleotide
  siRNAs to PCSK9
  modified_base (1)..(1): 2'-hydroxy corresponding base
  modified_base (2)..(2): 2'-hydroxy corresponding base
  modified_base (3)..(3): 2'-hydroxy corresponding base
  modified_base (4)..(4): 2'-hydroxy corresponding base
  modified_base (5)..(5): 2'-hydroxy corresponding base
  modified_base (6)..(6): 2'-hydroxy corresponding base
  modified_base (7)..(7): 2'-hydroxy corresponding base
  modified_base (8)..(8): 2'-hydroxy corresponding base
  modified_base (9)..(9): 2'-hydroxy corresponding base
  modified_base (10)..(10): 2'-hydroxy corresponding base
  modified_base (11)..(11): 2'-hydroxy corresponding base
  modified_base (12)..(12): 2'-hydroxy corresponding base
  modified_base (13)..(13): 2'-hydroxy corresponding base
  modified_base (14)..(14): 2'-hydroxy corresponding base
  modified_base (15)..(15): 2'-hydroxy corresponding base
  modified_base (16)..(16): 2'-hydroxy corresponding base
  modified_base (17)..(17): 2'-hydroxy corresponding base
  modified_base (18)..(18): 2'-hydroxy corresponding base
  modified_base (19)..(19): 2'-hydroxy corresponding base
  modified_base (20)..(20): deoxythymidine
  modified_base (21)..(21): deoxythymidine
gcgcacggccucuaggucutt

SEQ ID NO: 64 - DNA, 21 bp, Artificial Sequence
  Description of Artificial Sequence: Synthetic oligonucleotide
  Description of Combined DNA/RNA Molecule: Synthetic oligonucleotide
  siRNAs to PCSK9
  modified_base (1)..(1): 2'-hydroxy corresponding base
  modified_base (2)..(2): 2'-hydroxy corresponding base
  modified_base (3)..(3): 2'-hydroxy corresponding base
  modified_base (4)..(4): 2'-hydroxy corresponding base
  modified_base (5)..(5): 2'-hydroxy corresponding base
  modified_base (6)..(6): 2'-hydroxy corresponding base
  modified_base (7)..(7): 2'-hydroxy corresponding base
  modified_base (8)..(8): 2'-hydroxy corresponding base
  modified_base (9)..(9): 2'-hydroxy corresponding base
  modified_base (10)..(10): 2'-hydroxy corresponding base
  modified_base (11)..(11): 2'-hydroxy corresponding base
  modified_base (12)..(12): 2'-hydroxy corresponding base
  modified_base (13)..(13): 2'-hydroxy corresponding base
  modified_base (14)..(14): 2'-hydroxy corresponding base
  modified_base (15)..(15): 2'-hydroxy corresponding base
  modified_base (16)..(16): 2'-hydroxy corresponding base
  modified_base (17)..(17): 2'-hydroxy corresponding base
  modified_base (18)..(18): 2'-hydroxy corresponding base
  modified_base (19)..(19): 2'-hydroxy corresponding base
  modified_base (20)..(20): deoxythymidine
  modified_base (21)..(21): deoxythymidine
agaccuagaggccgugcgctt

SEQ ID NO: 65 - DNA, 21 bp, Artificial Sequence
  Description of Artificial Sequence: Synthetic oligonucleotide
  Description of Combined DNA/RNA Molecule: Synthetic oligonucleotide
  siRNAs to PCSK9
  modified_base (1)..(1): 2'-hydroxy corresponding base
  modified_base (2)..(2): 2'-hydroxy corresponding base
  modified_base (3)..(3): 2'-hydroxy corresponding base
  modified_base (4)..(4): 2'-hydroxy corresponding base
  modified_base (5)..(5): 2'-hydroxy corresponding base
  modified_base (6)..(6): 2'-hydroxy corresponding base
  modified_base (7)..(7): 2'-hydroxy corresponding base
  modified_base (8)..(8): 2'-hydroxy corresponding base
  modified_base (9)..(9): 2'-hydroxy corresponding base
  modified_base (10)..(10): 2'-hydroxy corresponding base
  modified_base (11)..(11): 2'-hydroxy corresponding base
  modified_base (12)..(12): 2'-hydroxy corresponding base
  modified_base (13)..(13): 2'-hydroxy corresponding base
  modified_base (14)..(14): 2'-hydroxy corresponding base
  modified_base (15)..(15): 2'-hydroxy corresponding base
  modified_base (16)..(16): 2'-hydroxy corresponding base
  modified_base (17)..(17): 2'-hydroxy corresponding base
  modified_base (18)..(18): 2'-hydroxy corresponding base
  modified_base (19)..(19): 2'-hydroxy corresponding base
  modified_base (20)..(20): deoxythymidine
  modified_base (21)..(21): deoxythymidine
cgcacggccucuaggucuctt

SEQ ID NO: 66 - DNA, 21 bp, Artificial Sequence
  Description of Artificial Sequence: Synthetic oligonucleotide
  Description of Combined DNA/RNA Molecule: Synthetic oligonucleotide
  siRNAs to PCSK9
  modified_base (1)..(1): 2'-hydroxy corresponding base
  modified_base (2)..(2): 2'-hydroxy corresponding base
  modified_base (3)..(3): 2'-hydroxy corresponding base
  modified_base (4)..(4): 2'-hydroxy corresponding base
  modified_base (5)..(5): 2'-hydroxy corresponding base
  modified_base (6)..(6): 2'-hydroxy corresponding base
  modified_base (7)..(7): 2'-hydroxy corresponding base
  modified_base (8)..(8): 2'-hydroxy corresponding base
  modified_base (9)..(9): 2'-hydroxy corresponding base
  modified_base (10)..(10): 2'-hydroxy corresponding base
  modified_base (11)..(11): 2'-hydroxy corresponding base
  modified_base (12)..(12): 2'-hydroxy corresponding base
  modified_base (13)..(13): 2'-hydroxy corresponding base
  modified_base (14)..(14): 2'-hydroxy corresponding base
  modified_base (15)..(15): 2'-hydroxy corresponding base
  modified_base (16)..(16): 2'-hydroxy corresponding base
  modified_base (17)..(17): 2'-hydroxy corresponding base
  modified_base (18)..(18): 2'-hydroxy corresponding base
  modified_base (19)..(19): 2'-hydroxy corresponding base
  modified_base (20)..(20): deoxythymidine
  modified_base (21)..(21): deoxythymidine
gagaccuagaggccgugcgtt

SEQ ID NO: 67 - DNA, 21 bp, Artificial Sequence
  Description of Artificial Sequence: Synthetic oligonucleotide
  Description of Combined DNA/RNA Molecule: Synthetic oligonucleotide
  siRNAs to PCSK9
  modified_base (1)..(1): 2'-hydroxy corresponding base
  modified_base (2)..(2): 2'-hydroxy corresponding base
  modified_base (3)..(3): 2'-hydroxy corresponding base
  modified_base (4)..(4): 2'-hydroxy corresponding base
  modified_base (5)..(5): 2'-hydroxy corresponding base
  modified_base (6)..(6): 2'-hydroxy corresponding base
  modified_base (7)..(7): 2'-hydroxy corresponding base
  modified_base (8)..(8): 2'-hydroxy corresponding base
  modified_base (9)..(9): 2'-hydroxy corresponding base
  modified_base (10)..(10): 2'-hydroxy corresponding base
  modified_base (11)..(11): 2'-hydroxy corresponding base
  modified_base (12)..(12): 2'-hydroxy corresponding base
  modified_base (13)..(13): 2'-hydroxy corresponding base
  modified_base (14)..(14): 2'-hydroxy corresponding base
  modified_base (15)..(15): 2'-hydroxy corresponding base
  modified_base (16)..(16): 2'-hydroxy corresponding base
  modified_base (17)..(17): 2'-hydroxy corresponding base
  modified_base (18)..(18): 2'-hydroxy corresponding base
  modified_base (19)..(19): 2'-hydroxy corresponding base
  modified_base (20)..(20): deoxythymidine
  modified_base (21)..(21): deoxythymidine
cucuaggucuccucgccagtt

SEQ ID NO: 68 - DNA, 21 bp, Artificial Sequence
  Description of Artificial Sequence: Synthetic oligonucleotide
  Description of Combined DNA/RNA Molecule: Synthetic oligonucleotide
  siRNAs to PCSK9
  modified_base (1)..(1): 2'-hydroxy corresponding base
  modified_base (2)..(2): 2'-hydroxy corresponding base
  modified_base (3)..(3): 2'-hydroxy corresponding base
  modified_base (4)..(4): 2'-hydroxy corresponding base
  modified_base (5)..(5): 2'-hydroxy corresponding base
  modified_base (6)..(6): 2'-hydroxy corresponding base
  modified_base (7)..(7): 2'-hydroxy corresponding base
  modified_base (8)..(8): 2'-hydroxy corresponding base
  modified_base (9)..(9): 2'-hydroxy corresponding base
  modified_base (10)..(10): 2'-hydroxy corresponding base
  modified_base (11)..(11): 2'-hydroxy corresponding base
  modified_base (12)..(12): 2'-hydroxy corresponding base
  modified_base (13)..(13): 2'-hydroxy corresponding base
  modified_base (14)..(14): 2'-hydroxy corresponding base
  modified_base (15)..(15): 2'-hydroxy corresponding base
  modified_base (16)..(16): 2'-hydroxy corresponding base
  modified_base (17)..(17): 2'-hydroxy corresponding base
  modified_base (18)..(18): 2'-hydroxy corresponding base
  modified_base (19)..(19): 2'-hydroxy corresponding base
  modified_base (20)..(20): deoxythymidine
  modified_base (21)..(21): deoxythymidine
cuggcgaggagaccuagagtt

SEQ ID NO: 69 - DNA, 21 bp, Artificial Sequence
  Description of Artificial Sequence: Synthetic oligonucleotide
  Description of Combined DNA/RNA Molecule: Synthetic oligonucleotide
  siRNAs to PCSK9
  modified_base (1)..(1): 2'-hydroxy corresponding base
  modified_base (2)..(2): 2'-hydroxy corresponding base
  modified_base (3)..(3): 2'-hydroxy corresponding base
  modified_base (4)..(4): 2'-hydroxy corresponding base
  modified_base (5)..(5): 2'-hydroxy corresponding base
  modified_base (6)..(6): 2'-hydroxy corresponding base
  modified_base (7)..(7): 2'-hydroxy corresponding base
  modified_base (8)..(8): 2'-hydroxy corresponding base
  modified_base (9)..(9): 2'-hydroxy corresponding base
  modified_base (10)..(10): 2'-hydroxy corresponding base
  modified_base (11)..(11): 2'-hydroxy corresponding base
  modified_base (12)..(12): 2'-hydroxy corresponding base
  modified_base (13)..(13): 2'-hydroxy corresponding base
  modified_base (14)..(14): 2'-hydroxy corresponding base
  modified_base (15)..(15): 2'-hydroxy corresponding base
  modified_base (16)..(16): 2'-hydroxy corresponding base
  modified_base (17)..(17): 2'-hydroxy corresponding base
  modified_base (18)..(18): 2'-hydroxy corresponding base
  modified_base (19)..(19): 2'-hydroxy corresponding base
  modified_base (20)..(20): deoxythymidine
  modified_base (21)..(21): deoxythymidine
ucuaggucuccucgccaggtt

SEQ ID NO: 70 - DNA, 21 bp, Artificial Sequence
  Description of Artificial Sequence: Synthetic oligonucleotide
  Description of Combined DNA/RNA Molecule: Synthetic oligonucleotide
  siRNAs to PCSK9
  modified_base (1)..(1): 2'-hydroxy corresponding base
  modified_base (2)..(2): 2'-hydroxy corresponding base
  modified_base (3)..(3): 2'-hydroxy corresponding base
  modified_base (4)..(4): 2'-hydroxy corresponding base
  modified_base (5)..(5): 2'-hydroxy corresponding base
  modified_base (6)..(6): 2'-hydroxy corresponding base
  modified_base (7)..(7): 2'-hydroxy corresponding base
  modified_base (8)..(8): 2'-hydroxy corresponding base
  modified_base (9)..(9): 2'-hydroxy corresponding base
  modified_base (10)..(10): 2'-hydroxy corresponding base
  modified_base (11)..(11): 2'-hydroxy corresponding base
  modified_base (12)..(12): 2'-hydroxy corresponding base
  modified_base (13)..(13): 2'-hydroxy corresponding base
  modified_base (14)..(14): 2'-hydroxy corresponding base
  modified_base (15)..(15): 2'-hydroxy corresponding base
  modified_base (16)..(16): 2'-hydroxy corresponding base
  modified_base (17)..(17): 2'-hydroxy corresponding base
  modified_base (18)..(18): 2'-hydroxy corresponding base
  modified_base (19)..(19): 2'-hydroxy corresponding base
  modified_base (20)..(20): deoxythymidine
  modified_base (21)..(21): deoxythymidine
ccuggcgaggagaccuagatt

SEQ ID NO: 71 - DNA, 21 bp, Artificial Sequence
  Description of Artificial Sequence: Synthetic oligonucleotide
  Description of Combined DNA/RNA Molecule: Synthetic oligonucleotide
  siRNAs to PCSK9
  modified_base (1)..(1): 2'-hydroxy corresponding base
  modified_base (2)..(2): 2'-hydroxy corresponding base
  modified_base (3)..(3): 2'-hydroxy corresponding base
  modified_base (4)..(4): 2'-hydroxy corresponding base
  modified_base (5)..(5): 2'-hydroxy corresponding base
  modified_base (6)..(6): 2'-hydroxy corresponding base
  modified_base (7)..(7): 2'-hydroxy corresponding base
  modified_base (8)..(8): 2'-hydroxy corresponding base
  modified_base (9)..(9): 2'-hydroxy corresponding base
  modified_base (10)..(10): 2'-hydroxy corresponding base
  modified_base (11)..(11): 2'-hydroxy corresponding base
  modified_base (12)..(12): 2'-hydroxy corresponding base
  modified_base (13)..(13): 2'-hydroxy corresponding base
  modified_base (14)..(14): 2'-hydroxy corresponding base
  modified_base (15)..(15): 2'-hydroxy corresponding base
  modified_base (16)..(16): 2'-hydroxy corresponding base
  modified_base (17)..(17): 2'-hydroxy corresponding base
  modified_base (18)..(18): 2'-hydroxy corresponding base
  modified_base (19)..(19): 2'-hydroxy corresponding base
  modified_base (20)..(20): deoxythymidine
  modified_base (21)..(21): deoxythymidine
cuaggucuccucgccaggatt

SEQ ID NO: 72 - DNA, 21 bp, Artificial Sequence
  Description of Artificial Sequence: Synthetic oligonucleotide
  Description of Combined DNA/RNA Molecule: Synthetic oligonucleotide
  siRNAs to PCSK9
  modified_base (1)..(1): 2'-hydroxy corresponding base
  modified_base (2)..(2): 2'-hydroxy corresponding base
  modified_base (3)..(3): 2'-hydroxy corresponding base
  modified_base (4)..(4): 2'-hydroxy corresponding base
  modified_base (5)..(5): 2'-hydroxy corresponding base
  modified_base (6)..(6): 2'-hydroxy corresponding base
  modified_base (7)..(7): 2'-hydroxy corresponding base
  modified_base (8)..(8): 2'-hydroxy corresponding base
  modified_base (9)..(9): 2'-hydroxy corresponding base
  modified_base (10)..(10): 2'-hydroxy corresponding base
  modified_base (11)..(11): 2'-hydroxy corresponding base
  modified_base (12)..(12): 2'-hydroxy corresponding base
  modified_base (13)..(13): 2'-hydroxy corresponding base
  modified_base (14)..(14): 2'-hydroxy corresponding base
  modified_base (15)..(15): 2'-hydroxy corresponding base
  modified_base (16)..(16): 2'-hydroxy corresponding base
  modified_base (17)..(17): 2'-hydroxy corresponding base
  modified_base (18)..(18): 2'-hydroxy corresponding base
  modified_base (19)..(19): 2'-hydroxy corresponding base
  modified_base (20)..(20): deoxythymidine
  modified_base (21)..(21): deoxythymidine
uccuggcgaggagaccuagtt

SEQ ID NO: 73 - DNA, 21 bp, Artificial Sequence
  Description of Artificial Sequence: Synthetic oligonucleotide
  Description of Combined DNA/RNA Molecule: Synthetic oligonucleotide
  siRNAs to PCSK9
  modified_base (1)..(1): 2'-hydroxy corresponding base
  modified_base (2)..(2): 2'-hydroxy corresponding base
  modified_base (3)..(3): 2'-hydroxy corresponding base
  modified_base (4)..(4): 2'-hydroxy corresponding base
  modified_base (5)..(5): 2'-hydroxy corresponding base
  modified_base (6)..(6): 2'-hydroxy corresponding base
  modified_base (7)..(7): 2'-hydroxy corresponding base
  modified_base (8)..(8): 2'-hydroxy corresponding base
  modified_base (9)..(9): 2'-hydroxy corresponding base
  modified_base (10)..(10): 2'-hydroxy corresponding base
  modified_base (11)..(11): 2'-hydroxy corresponding base
  modified_base (12)..(12): 2'-hydroxy corresponding base
  modified_base (13)..(13): 2'-hydroxy corresponding base
  modified_base (14)..(14): 2'-hydroxy corresponding base
  modified_base (15)..(15): 2'-hydroxy corresponding base
  modified_base (16)..(16): 2'-hydroxy corresponding base
  modified_base (17)..(17): 2'-hydroxy corresponding base
  modified_base (18)..(18): 2'-hydroxy corresponding base
  modified_base (19)..(19): 2'-hydroxy corresponding base
  modified_base (20)..(20): deoxythymidine
  modified_base (21)..(21): deoxythymidine
aggucuccucgccaggacatt

SEQ ID NO: 74 - DNA, 21 bp, Artificial Sequence
  Description of Artificial Sequence: Synthetic oligonucleotide
  Description of Combined DNA/RNA Molecule: Synthetic oligonucleotide
  siRNAs to PCSK9
  modified_base (1)..(1): 2'-hydroxy corresponding base
  modified_base (2)..(2): 2'-hydroxy corresponding base
  modified_base (3)..(3): 2'-hydroxy corresponding base
  modified_base (4)..(4): 2'-hydroxy corresponding base
  modified_base (5)..(5): 2'-hydroxy corresponding base
  modified_base (6)..(6): 2'-hydroxy corresponding base
  modified_base (7)..(7): 2'-hydroxy corresponding base
  modified_base (8)..(8): 2'-hydroxy corresponding base
  modified_base (9)..(9): 2'-hydroxy corresponding base
  modified_base (10)..(10): 2'-hydroxy corresponding base
  modified_base (11)..(11): 2'-hydroxy corresponding base
  modified_base (12)..(12): 2'-hydroxy corresponding base
  modified_base (13)..(13): 2'-hydroxy corresponding base
  modified_base (14)..(14): 2'-hydroxy corresponding base
  modified_base (15)..(15): 2'-hydroxy corresponding base
  modified_base (16)..(16): 2'-hydroxy corresponding base
  modified_base (17)..(17): 2'-hydroxy corresponding base
  modified_base (18)..(18): 2'-hydroxy corresponding base
  modified_base (19)..(19): 2'-hydroxy corresponding base
  modified_base (20)..(20): deoxythymidine
  modified_base (21)..(21): deoxythymidine
uguccuggcgaggagaccutt

SEQ ID NO: 75 - DNA, 21 bp, Artificial Sequence
  Description of Artificial Sequence: Synthetic oligonucleotide
  Description of Combined DNA/RNA Molecule: Synthetic oligonucleotide
  siRNAs to PCSK9
  modified_base (1)..(1): 2'-hydroxy corresponding base
  modified_base (2)..(2): 2'-hydroxy corresponding base
  modified_base (3)..(3): 2'-hydroxy corresponding base
  modified_base (4)..(4): 2'-hydroxy corresponding base
  modified_base (5)..(5): 2'-hydroxy corresponding base
  modified_base (6)..(6): 2'-hydroxy corresponding base
  modified_base (7)..(7): 2'-hydroxy corresponding base
  modified_base (8)..(8): 2'-hydroxy corresponding base
  modified_base (9)..(9): 2'-hydroxy corresponding base
  modified_base (10)..(10): 2'-hydroxy corresponding base
  modified_base (11)..(11): 2'-hydroxy corresponding base
  modified_base (12)..(12): 2'-hydroxy corresponding base
  modified_base (13)..(13): 2'-hydroxy corresponding base
  modified_base (14)..(14): 2'-hydroxy corresponding base
  modified_base (15)..(15): 2'-hydroxy corresponding base
  modified_base (16)..(16): 2'-hydroxy corresponding base
  modified_base (17)..(17): 2'-hydroxy corresponding base
  modified_base (18)..(18): 2'-hydroxy corresponding base
  modified_base (19)..(19): 2'-hydroxy corresponding base
  modified_base (20)..(20): deoxythymidine
  modified_base (21)..(21): deoxythymidine
ccucgccaggacagcaacctt

SEQ ID NO: 76 - DNA, 21 bp, Artificial Sequence
  Description of Artificial Sequence: Synthetic oligonucleotide
  Description of Combined DNA/RNA Molecule: Synthetic oligonucleotide
  siRNAs to PCSK9
  modified_base (1)..(1): 2'-hydroxy corresponding base
  modified_base (2)..(2): 2'-hydroxy corresponding base
  modified_base (3)..(3): 2'-hydroxy corresponding base
  modified_base (4)..(4): 2'-hydroxy corresponding base
  modified_base (5)..(5): 2'-hydroxy corresponding base
  modified_base (6)..(6): 2'-hydroxy corresponding base
  modified_base (7)..(7): 2'-hydroxy corresponding base
  modified_base (8)..(8): 2'-hydroxy corresponding base
  modified_base (9)..(9): 2'-hydroxy corresponding base
  modified_base (10)..(10): 2'-hydroxy corresponding base
  modified_base (11)..(11): 2'-hydroxy corresponding base
  modified_base (12)..(12): 2'-hydroxy corresponding base
  modified_base (13)..(13): 2'-hydroxy corresponding base
  modified_base (14)..(14): 2'-hydroxy corresponding base
  modified_base (15)..(15): 2'-hydroxy corresponding base
  modified_base (16)..(16): 2'-hydroxy corresponding base
  modified_base (17)..(17): 2'-hydroxy corresponding base
  modified_base (18)..(18): 2'-hydroxy corresponding base
  modified_base (19)..(19): 2'-hydroxy corresponding base
  modified_base (20)..(20): deoxythymidine
  modified_base (21)..(21): deoxythymidine
gguugcuguccuggcgaggtt

SEQ ID NO: 77 - DNA, 21 bp, Artificial Sequence
  Description of Artificial Sequence: Synthetic oligonucleotide
  Description of Combined DNA/RNA Molecule: Synthetic oligonucleotide
  siRNAs to PCSK9
  modified_base (1)..(1): 2'-hydroxy corresponding base
  modified_base (2)..(2): 2'-hydroxy corresponding base
  modified_base (3)..(3): 2'-hydroxy corresponding base
  modified_base (4)..(4): 2'-hydroxy corresponding base
  modified_base (5)..(5): 2'-hydroxy corresponding base
  modified_base (6)..(6): 2'-hydroxy corresponding base
  modified_base (7)..(7): 2'-hydroxy corresponding base
  modified_base (8)..(8): 2'-hydroxy corresponding base
  modified_base (9)..(9): 2'-hydroxy corresponding base
  modified_base (10)..(10): 2'-hydroxy corresponding base
  modified_base (11)..(11): 2'-hydroxy corresponding base
  modified_base (12)..(12): 2'-hydroxy corresponding base
  modified_base (13)..(13): 2'-hydroxy corresponding base
  modified_base (14)..(14): 2'-hydroxy corresponding base
  modified_base (15)..(15): 2'-hydroxy corresponding base
  modified_base (16)..(16): 2'-hydroxy corresponding base
  modified_base (17)..(17): 2'-hydroxy corresponding base
  modified_base (18)..(18): 2'-hydroxy corresponding base
  modified_base (19)..(19): 2'-hydroxy corresponding base
  modified_base (20)..(20): deoxythymidine
  modified_base (21)..(21): 5'-thio thymidine
cgucagcuccaggcggucctt

SEQ ID NO: 78 - DNA, 21 bp, Artificial Sequence
  Description of Artificial Sequence: Synthetic oligonucleotide
  Description of Combined DNA/RNA Molecule: Synthetic oligonucleotide
  siRNAs to PCSK9
  modified_base (1)..(1): 2'-hydroxy corresponding base
  modified_base (2)..(2): 2'-hydroxy corresponding base
  modified_base (3)..(3): 2'-hydroxy corresponding base
  modified_base (4)..(4): 2'-hydroxy corresponding base
  modified_base (5)..(5): 2'-hydroxy corresponding base
  modified_base (6)..(6): 2'-hydroxy corresponding base
  modified_base (7)..(7): 2'-hydroxy corresponding base
  modified_base (8)..(8): 2'-hydroxy corresponding base
  modified_base (9)..(9): 2'-hydroxy corresponding base
  modified_base (10)..(10): 2'-hydroxy corresponding base
  modified_base (11)..(11): 2'-hydroxy corresponding base
  modified_base (12)..(12): 2'-hydroxy corresponding base
  modified_base (13)..(13): 2'-hydroxy corresponding base
  modified_base (14)..(14): 2'-hydroxy corresponding base
  modified_base (15)..(15): 2'-hydroxy corresponding base
  modified_base (16)..(16): 2'-hydroxy corresponding base
  modified_base (17)..(17): 2'-hydroxy corresponding base
  modified_base (18)..(18): 2'-hydroxy corresponding base
  modified_base (19)..(19): 2'-hydroxy corresponding base
  modified_base (20)..(20): deoxythymidine
  modified_base (21)..(21): 5'-thio thymidine
ggaccgccuggagcugacgtt

SEQ ID NO: 79 - DNA, 21 bp, Artificial Sequence
  Description of Artificial Sequence: Synthetic oligonucleotide
  Description of Combined DNA/RNA Molecule: Synthetic oligonucleotide
  siRNAs to PCSK9
  modified_base (1)..(1): 2'-O-methyl corresponding base
  modified_base (2)..(2): 2'-hydroxy corresponding base
  modified_base (3)..(3): 2'-O-methyl corresponding base
  modified_base (4)..(4): 2'-O-methyl corresponding base
  modified_base (5)..(5): 2'-hydroxy corresponding base
  modified_base (6)..(6): 2'-hydroxy corresponding base
  modified_base (7)..(7): 2'-O-methyl corresponding base
  modified_base (8)..(8): 2'-O-methyl corresponding base
  modified_base (9)..(9): 2'-O-methyl corresponding base
  modified_base (10)..(10): 2'-O-methyl corresponding base
  modified_base (11)..(11): 2'-hydroxy corresponding base
  modified_base (12)..(12): 2'-hydroxy corresponding base
  modified_base (13)..(13): 2'-hydroxy corresponding base
  modified_base (14)..(14): 2'-O-methyl corresponding base
  modified_base (15)..(15): 2'-hydroxy corresponding base
  modified_base (16)..(16): 2'-hydroxy corresponding base
  modified_base (17)..(17): 2'-O-methyl corresponding base
  modified_base (18)..(18): 2'-O-methyl corresponding base
  modified_base (19)..(19): 2'-O-methyl corresponding base
  modified_base (20)..(20): deoxythymidine
  modified_base (21)..(21): 5'-thio thymidine
cgucagcuccaggcggucctt

SEQ ID NO: 80 - DNA, 21 bp, Artificial Sequence
  Description of Artificial Sequence: Synthetic oligonucleotide
  Description of Combined DNA/RNA Molecule: Synthetic oligonucleotide
  siRNAs to PCSK9
  modified_base (1)..(1): 2'-hydroxy corresponding base
  modified_base (2)..(2): 2'-hydroxy corresponding base
  modified_base (3)..(3): 2'-hydroxy corresponding base
  modified_base (4)..(4): 2'-hydroxy corresponding base
  modified_base (5)..(5): 2'-hydroxy corresponding base
  modified_base (6)..(6): 2'-hydroxy corresponding base
  modified_base (7)..(7): 2'-hydroxy corresponding base
  modified_base (8)..(8): 2'-hydroxy corresponding base
  modified_base (9)..(9): 2'-hydroxy corresponding base
  modified_base (10)..(10): 2'-hydroxy corresponding base
  modified_base (11)..(11): 2'-hydroxy corresponding base
  modified_base (12)..(12): 2'-hydroxy corresponding base
  modified_base (13)..(13): 2'-hydroxy corresponding base
  modified_base (14)..(14): 2'-hydroxy corresponding base
  modified_base (15)..(15): 2'-hydroxy corresponding base
  modified_base (16)..(16): 2'-hydroxy corresponding base
  modified_base (17)..(17): 2'-hydroxy corresponding base
  modified_base (18)..(18): 2'-hydroxy corresponding base
  modified_base (19)..(19): 2'-hydroxy corresponding base
  modified_base (20)..(20): deoxythymidine
  modified_base (21)..(21): 5'-thio thymidine
ggaccgccuggagcugacgtt

SEQ ID NO: 81 - DNA, 21 bp, Artificial Sequence
  Description of Artificial Sequence: Synthetic oligonucleotide
  Description of Combined DNA/RNA Molecule: Synthetic oligonucleotide
  siRNAs to PCSK9
  modified_base (1)..(1): 2'-hydroxy corresponding base
  modified_base (2)..(2): 2'-hydroxy corresponding base
  modified_base (3)..(3): 2'-hydroxy corresponding base
  modified_base (4)..(4): 2'-hydroxy corresponding base
  modified_base (5)..(5): 2'-hydroxy corresponding base
  modified_base (6)..(6): 2'-hydroxy corresponding base
  modified_base (7)..(7): 2'-hydroxy corresponding base
  modified_base (8)..(8): 2'-hydroxy corresponding base
  modified_base (9)..(9): 2'-hydroxy corresponding base
  modified_base (10)..(10): 2'-hydroxy corresponding base
  modified_base (11)..(11): 2'-hydroxy corresponding base
  modified_base (12)..(12): 2'-hydroxy corresponding base
  modified_base (13)..(13): 2'-hydroxy corresponding base
  modified_base (14)..(14): 2'-hydroxy corresponding base
  modified_base (15)..(15): 2'-hydroxy corresponding base
  modified_base (16)..(16): 2'-hydroxy corresponding base
  modified_base (17)..(17): 2'-hydroxy corresponding base
  modified_base (18)..(18): 2'-hydroxy corresponding base
  modified_base (19)..(19): 2'-hydroxy corresponding base
  modified_base (20)..(20): deoxythymidine
  modified_base (21)..(21): 5'-thio thymidine
gucagcuccaggcgguccutt

SEQ ID NO: 82 - DNA, 21 bp, Artificial Sequence
  Description of Artificial Sequence: Synthetic oligonucleotide
  Description of Combined DNA/RNA Molecule: Synthetic oligonucleotide
  siRNAs to PCSK9
  modified_base (1)..(1): 2'-hydroxy corresponding base
  modified_base (2)..(2): 2'-hydroxy corresponding base
  modified_base (3)..(3): 2'-hydroxy corresponding base
  modified_base (4)..(4): 2'-hydroxy corresponding base
  modified_base (5)..(5): 2'-hydroxy corresponding base
  modified_base (6)..(6): 2'-hydroxy corresponding base
  modified_base (7)..(7): 2'-hydroxy corresponding base
  modified_base (8)..(8): 2'-hydroxy corresponding base
  modified_base (9)..(9): 2'-hydroxy corresponding base
  modified_base (10)..(10): 2'-hydroxy corresponding base
  modified_base (11)..(11): 2'-hydroxy corresponding base
  modified_base (12)..(12): 2'-hydroxy corresponding base
  modified_base (13)..(13): 2'-hydroxy corresponding base
  modified_base (14)..(14): 2'-hydroxy corresponding base
  modified_base (15)..(15): 2'-hydroxy corresponding base
  modified_base (16)..(16): 2'-hydroxy corresponding base
  modified_base (17)..(17): 2'-hydroxy corresponding base
  modified_base (18)..(18): 2'-hydroxy corresponding base
  modified_base (19)..(19): 2'-hydroxy corresponding base
  modified_base (20)..(20): deoxythymidine
  modified_base (21)..(21): 5'-thio thymidine
aggaccgccuggagcugactt

SEQ ID NO: 83 - DNA, 21 bp, Artificial Sequence
  Description of Artificial Sequence: Synthetic oligonucleotide
  Description of Combined DNA/RNA Molecule: Synthetic oligonucleotide
  siRNAs to PCSK9
  modified_base (1)..(1): 2'-hydroxy corresponding base
  modified_base (2)..(2): 2'-O-methyl corresponding base
  modified_base (3)..(3): 2'-O-methyl corresponding base
  modified_base (4)..(4): 2'-hydroxy corresponding base
  modified_base (5)..(5): 2'-hydroxy corresponding base
  modified_base (6)..(6): 2'-O-methyl corresponding base
  modified_base (7)..(7): 2'-O-methyl corresponding base
  modified_base (8)..(8): 2'-O-methyl corresponding base
  modified_base (9)..(9): 2'-O-methyl corresponding base
  modified_base (10)..(10): 2'-hydroxy corresponding base
  modified_base (11)..(11): 2'-hydroxy corresponding base
  modified_base (12)..(12): 2'-hydroxy corresponding base
  modified_base (13)..(13): 2'-O-methyl corresponding base
  modified_base (14)..(14): 2'-hydroxy corresponding base
  modified_base (15)..(15): 2'-hydroxy corresponding base
  modified_base (16)..(16): 2'-O-methyl corresponding base
  modified_base (17)..(17): 2'-O-methyl corresponding base
  modified_base (18)..(18): 2'-O-methyl corresponding base
  modified_base (19)..(19): 2'-O-methyl corresponding base
  modified_base (20)..(20): deoxythymidine
  modified_base (21)..(21): 5'-thio thymidine
gucagcuccaggcgguccutt

SEQ ID NO: 84 - DNA, 21 bp, Artificial Sequence
  Description of Artificial Sequence: Synthetic oligonucleotide
  Description of Combined DNA/RNA Molecule: Synthetic oligonucleotide
  siRNAs to PCSK9
  modified_base (1)..(1): 2'-hydroxy corresponding base
  modified_base (2)..(2): 2'-hydroxy corresponding base
  modified_base (3)..(3): 2'-hydroxy corresponding base
  modified_base (4)..(4): 2'-hydroxy corresponding base
  modified_base (5)..(5): 2'-hydroxy corresponding base
  modified_base (6)..(6): 2'-hydroxy corresponding base
  modified_base (7)..(7): 2'-hydroxy corresponding base
  modified_base (8)..(8): 2'-hydroxy corresponding base
  modified_base (9)..(9): 2'-hydroxy corresponding base
  modified_base (10)..(10): 2'-hydroxy corresponding base
  modified_base (11)..(11): 2'-hydroxy corresponding base
  modified_base (12)..(12): 2'-hydroxy corresponding base
  modified_base (13)..(13): 2'-hydroxy corresponding base
  modified_base (14)..(14): 2'-hydroxy corresponding base
  modified_base (15)..(15): 2'-hydroxy corresponding base
  modified_base (16)..(16): 2'-hydroxy corresponding base
  modified_base (17)..(17): 2'-hydroxy corresponding base
  modified_base (18)..(18): 2'-hydroxy corresponding base
  modified_base (19)..(19): 2'-hydroxy corresponding base
  modified_base (20)..(20): deoxythymidine
  modified_base (21)..(21): 5'-thio thymidine
aggaccgccuggagcugactt

SEQ ID NO: 85 - DNA, 21 bp, Artificial Sequence
  Description of Artificial Sequence: Synthetic oligonucleotide
  Description of Combined DNA/RNA Molecule: Synthetic oligonucleotide
  siRNAs to PCSK9
  modified_base (1)..(1): 2'-hydroxy corresponding base
  modified_base (2)..(2): 2'-hydroxy corresponding base
  modified_base (3)..(3): 2'-hydroxy corresponding base
  modified_base (4)..(4): 2'-hydroxy corresponding base
  modified_base (5)..(5): 2'-hydroxy corresponding base
  modified_base (6)..(6): 2'-hydroxy corresponding base
  modified_base (7)..(7): 2'-hydroxy corresponding base
  modified_base (8)..(8): 2'-hydroxy corresponding base
  modified_base (9)..(9): 2'-hydroxy corresponding base
  modified_base (10)..(10): 2'-hydroxy corresponding base
  modified_base (11)..(11): 2'-hydroxy corresponding base
  modified_base (12)..(12): 2'-hydroxy corresponding base
  modified_base (13)..(13): 2'-hydroxy corresponding base
  modified_base (14)..(14): 2'-hydroxy corresponding base
  modified_base (15)..(15): 2'-hydroxy corresponding base
  modified_base (16)..(16): 2'-hydroxy corresponding base
  modified_base (17)..(17): 2'-hydroxy corresponding base
  modified_base (18)..(18): 2'-hydroxy corresponding base
  modified_base (19)..(19): 2'-hydroxy corresponding base
  modified_base (20)..(20): deoxythymidine
  modified_base (21)..(21): deoxythymidine
ggcgcccgugcgcaggaggtt

SEQ ID NO: 86 - DNA, 21 bp, Artificial Sequence
  Description of Artificial Sequence: Synthetic oligonucleotide
  Description of Combined DNA/RNA Molecule: Synthetic oligonucleotide
  siRNAs to PCSK9
  modified_base (1)..(1): 2'-hydroxy corresponding base
  modified_base (2)..(2): 2'-hydroxy corresponding base
  modified_base (3)..(3): 2'-hydroxy corresponding base
  modified_base (4)..(4): 2'-hydroxy corresponding base
  modified_base (5)..(5): 2'-hydroxy corresponding base
  modified_base (6)..(6): 2'-hydroxy corresponding base
  modified_base (7)..(7): 2'-hydroxy corresponding base
  modified_base (8)..(8): 2'-hydroxy corresponding base
  modified_base (9)..(9): 2'-hydroxy corresponding base
  modified_base (10)..(10): 2'-hydroxy corresponding base
  modified_base (11)..(11): 2'-hydroxy corresponding base
  modified_base (12)..(12): 2'-hydroxy corresponding base
  modified_base (13)..(13): 2'-hydroxy corresponding base
  modified_base (14)..(14): 2'-hydroxy corresponding base
  modified_base (15)..(15): 2'-hydroxy corresponding base
  modified_base (16)..(16): 2'-hydroxy corresponding base
  modified_base (17)..(17): 2'-hydroxy corresponding base
  modified_base (18)..(18): 2'-hydroxy corresponding base
  modified_base (19)..(19): 2'-hydroxy corresponding base
  modified_base (20)..(20): deoxythymidine
  modified_base (21)..(21): deoxythymidine
ccuccugcgcacgggcgcctt

SEQ ID NO: 87 - DNA, 21 bp, Artificial Sequence
  Description of Artificial Sequence: Synthetic oligonucleotide
  Description of Combined DNA/RNA Molecule: Synthetic oligonucleotide
  siRNAs to PCSK9
  modified_base (1)..(1): 2'-hydroxy corresponding base
  modified_base (2)..(2): 2'-hydroxy corresponding base
  modified_base (3)..(3): 2'-hydroxy corresponding base
  modified_base (4)..(4): 2'-hydroxy corresponding base
  modified_base (5)..(5): 2'-hydroxy corresponding base
  modified_base (6)..(6): 2'-hydroxy corresponding base
  modified_base (7)..(7): 2'-hydroxy corresponding base
  modified_base (8)..(8): 2'-hydroxy corresponding base
  modified_base (9)..(9): 2'-hydroxy corresponding base
  modified_base (10)..(10): 2'-hydroxy corresponding base
  modified_base (11)..(11): 2'-hydroxy corresponding base
  modified_base (12)..(12): 2'-hydroxy corresponding base
  modified_base (13)..(13): 2'-hydroxy corresponding base
  modified_base (14)..(14): 2'-hydroxy corresponding base
  modified_base (15)..(15): 2'-hydroxy corresponding base
  modified_base (16)..(16): 2'-hydroxy corresponding base
  modified_base (17)..(17): 2'-hydroxy corresponding base
  modified_base (18)..(18): 2'-hydroxy corresponding base
  modified_base (19)..(19): 2'-hydroxy corresponding base
  modified_base (20)..(20): deoxythymidine
  modified_base (21)..(21): 5'-thio thymidine
ggagcuggugcuagccuugtt

SEQ ID NO: 88 - DNA, 21 bp, Artificial Sequence
  Description of Artificial Sequence: Synthetic oligonucleotide
  Description of Combined DNA/RNA Molecule: Synthetic oligonucleotide
  siRNAs to PCSK9
  modified_base (1)..(1): 2'-hydroxy corresponding base
  modified_base (2)..(2): 2'-hydroxy corresponding base
  modified_base (3)..(3): 2'-hydroxy corresponding base
  modified_base (4)..(4): 2'-hydroxy corresponding base
  modified_base (5)..(5): 2'-hydroxy corresponding base
  modified_base (6)..(6): 2'-hydroxy corresponding base
  modified_base (7)..(7): 2'-hydroxy corresponding base
  modified_base (8)..(8): 2'-hydroxy corresponding base
  modified_base (9)..(9): 2'-hydroxy corresponding base
  modified_base (10)..(10): 2'-hydroxy corresponding base
  modified_base (11)..(11): 2'-hydroxy corresponding base
  modified_base (12)..(12): 2'-hydroxy corresponding base
  modified_base (13)..(13): 2'-hydroxy corresponding base
  modified_base (14)..(14): 2'-hydroxy corresponding base
  modified_base (15)..(15): 2'-hydroxy corresponding base
  modified_base (16)..(16): 2'-hydroxy corresponding base
  modified_base (17)..(17): 2'-hydroxy corresponding base
  modified_base (18)..(18): 2'-hydroxy corresponding base
  modified_base (19)..(19): 2'-hydroxy corresponding base
  modified_base (20)..(20): deoxythymidine
  modified_base (21)..(21): 5'-thio thymidine
caaggcuagcaccagcucctt

SEQ ID NO: 89 - DNA, 21 bp, Artificial Sequence
  Description of Artificial Sequence: Synthetic oligonucleotide
  Description of Combined DNA/RNA Molecule: Synthetic oligonucleotide
  siRNAs to PCSK9
  modified_base (1)..(1): 2'-hydroxy corresponding base
  modified_base (2)..(2): 2'-hydroxy corresponding base
  modified_base (3)..(3): 2'-hydroxy corresponding base
  modified_base (4)..(4): 2'-hydroxy corresponding base
  modified_base (5)..(5): 2'-O-methyl corresponding base
  modified_base (6)..(6): 2'-O-methyl corresponding base
  modified_base (7)..(7): 2'-hydroxy corresponding base
  modified_base (8)..(8): 2'-hydroxy corresponding base
  modified_base (9)..(9): 2'-O-methyl corresponding base
  modified_base (10)..(10): 2'-hydroxy corresponding base
  modified_base (11)..(11): 2'-O-methyl corresponding base
  modified_base (12)..(12): 2'-O-methyl corresponding base
  modified_base (13)..(13): 2'-hydroxy corresponding base
  modified_base (14)..(14): 2'-hydroxy corresponding base
  modified_base (15)..(15): 2'-O-methyl corresponding base
  modified_base (16)..(16): 2'-O-methyl corresponding base
  modified_base (17)..(17): 2'-O-methyl corresponding base
  modified_base (18)..(18): 2'-O-methyl corresponding base
  modified_base (19)..(19): 2'-hydroxy corresponding base
  modified_base (20)..(20): deoxythymidine
  modified_base (21)..(21): 5'-thio thymidine
ggagcuggugcuagccuugtt

SEQ ID NO: 90 - DNA, 21 bp, Artificial Sequence
  Description of Artificial Sequence: Synthetic oligonucleotide
  Description of Combined DNA/RNA Molecule: Synthetic oligonucleotide
  siRNAs to PCSK9
  modified_base (1)..(1): 2'-O-methyl corresponding base
  modified_base (2)..(2): 2'-hydroxy corresponding base
  modified_base (3)..(3): 2'-hydroxy corresponding base
  modified_base (4)..(4): 2'-hydroxy corresponding base
  modified_base (5)..(5): 2'-hydroxy corresponding base
  modified_base (6)..(6): 2'-hydroxy corresponding base
  modified_base (7)..(7): 2'-O-methyl corresponding base
  modified_base (8)..(8): 2'-hydroxy corresponding base
  modified_base (9)..(9): 2'-hydroxy corresponding base
  modified_base (10)..(10): 2'-O-methyl corresponding base
  modified_base (11)..(11): 2'-hydroxy corresponding base
  modified_base (12)..(12): 2'-hydroxy corresponding base
  modified_base (13)..(13): 2'-O-methyl corresponding base
  modified_base (14)..(14): 2'-hydroxy corresponding base
  modified_base (15)..(15): 2'-hydroxy corresponding base
  modified_base (16)..(16): 2'-hydroxy corresponding base
  modified_base (17)..(17): 2'-hydroxy corresponding base
  modified_base (18)..(18): 2'-hydroxy corresponding base
  modified_base (19)..(19): 2'-hydroxy corresponding base
  modified_base (20)..(20): deoxythymidine
  modified_base (21)..(21): 5'-thio thymidine
caaggcuagcaccagcucctt

SEQ ID NO: 91 - DNA, 21 bp, Artificial Sequence
  Description of Artificial Sequence: Synthetic oligonucleotide
  Description of Combined DNA/RNA Molecule: Synthetic oligonucleotide
  siRNAs to PCSK9
  modified_base (1)..(1): 2'-hydroxy corresponding base
  modified_base (2)..(2): 2'-hydroxy corresponding base
  modified_base (3)..(3): 2'-hydroxy corresponding base
  modified_base (4)..(4): 2'-hydroxy corresponding base
  modified_base (5)..(5): 2'-hydroxy corresponding base
  modified_base (6)..(6): 2'-hydroxy corresponding base
  modified_base (7)..(7): 2'-hydroxy corresponding base
  modified_base (8)..(8): 2'-hydroxy corresponding base
  modified_base (9)..(9): 2'-hydroxy corresponding base
  modified_base (10)..(10): 2'-hydroxy corresponding base
  modified_base (11)..(11): 2'-hydroxy corresponding base
  modified_base (12)..(12): 2'-hydroxy corresponding base
  modified_base (13)..(13): 2'-hydroxy corresponding base
  modified_base (14)..(14): 2'-hydroxy corresponding base
  modified_base (15)..(15): 2'-hydroxy corresponding base
  modified_base (16)..(16): 2'-hydroxy corresponding base
  modified_base (17)..(17): 2'-hydroxy corresponding base
  modified_base (18)..(18): 2'-hydroxy corresponding base
  modified_base (19)..(19): 2'-hydroxy corresponding base
  modified_base (20)..(20): deoxythymidine
  modified_base (21)..(21): 5'-thio thymidine
gcuggugcuagccuugcgutt

SEQ ID NO: 92 - DNA, 21 bp, Artificial Sequence
  Description of Artificial Sequence: Synthetic oligonucleotide
  Description of Combined DNA/RNA Molecule: Synthetic oligonucleotide
  siRNAs to PCSK9
  modified_base (1)..(1): 2'-hydroxy corresponding base
  modified_base (2)..(2): 2'-hydroxy corresponding base
  modified_base (3)..(3): 2'-hydroxy corresponding base
  modified_base (4)..(4): 2'-hydroxy corresponding base
  modified_base (5)..(5): 2'-hydroxy corresponding base
  modified_base (6)..(6): 2'-hydroxy corresponding base
  modified_base (7)..(7): 2'-hydroxy corresponding base
  modified_base (8)..(8): 2'-hydroxy corresponding base
  modified_base (9)..(9): 2'-hydroxy corresponding base
  modified_base (10)..(10): 2'-hydroxy corresponding base
  modified_base (11)..(11): 2'-hydroxy corresponding base
  modified_base (12)..(12): 2'-hydroxy corresponding base
  modified_base (13)..(13): 2'-hydroxy corresponding base
  modified_base (14)..(14): 2'-hydroxy corresponding base
  modified_base (15)..(15): 2'-hydroxy corresponding base
  modified_base (16)..(16): 2'-hydroxy corresponding base
  modified_base (17)..(17): 2'-hydroxy corresponding base
  modified_base (18)..(18): 2'-hydroxy corresponding base
  modified_base (19)..(19): 2'-hydroxy corresponding base
  modified_base (20)..(20): deoxythymidine
  modified_base (21)..(21): 5'-thio thymidine
acgcaaggcuagcaccagctt

SEQ ID NO: 93 - DNA, 21 bp, Artificial Sequence
  Description of Artificial Sequence: Synthetic oligonucleotide
  Description of Combined DNA/RNA Molecule: Synthetic oligonucleotide
  siRNAs to PCSK9
  modified_base (1)..(1): 2'-hydroxy corresponding base
  modified_base (2)..(2): 2'-O-methyl corresponding base
  modified_base (3)..(3): 2'-O-methyl corresponding base
  modified_base (4)..(4): 2'-hydroxy corresponding base
  modified_base (5)..(5): 2'-hydroxy corresponding base
  modified_base (6)..(6): 2'-O-methyl corresponding base
  modified_base (7)..(7): 2'-hydroxy corresponding base
  modified_base (8)..(8): 2'-O-methyl corresponding base
  modified_base (9)..(9): 2'-O-methyl corresponding base
  modified_base (10)..(10): 2'-hydroxy corresponding base
  modified_base (11)..(11): 2'-hydroxy corresponding base
  modified_base (12)..(12): 2'-O-methyl corresponding base
  modified_base (13)..(13): 2'-O-methyl corresponding base
  modified_base (14)..(14): 2'-O-methyl corresponding base
  modified_base (15)..(15): 2'-O-methyl corresponding base
  modified_base (16)..(16): 2'-hydroxy corresponding base
  modified_base (17)..(17): 2'-O-methyl corresponding base
  modified_base (18)..(18): 2'-hydroxy corresponding base
  modified_base (19)..(19): 2'-O-methyl corresponding base
  modified_base (20)..(20): deoxythymidine
  modified_base (21)..(21): 5'-thio thymidine
gcuggugcuagccuugcgutt

SEQ ID NO: 94 - DNA, 21 bp, Artificial Sequence
  Description of Artificial Sequence: Synthetic oligonucleotide
  Description of Combined DNA/RNA Molecule: Synthetic oligonucleotide
  siRNAs to PCSK9
  modified_base (1)..(1): 2'-hydroxy corresponding base
  modified_base (2)..(2): 2'-hydroxy corresponding base
  modified_base (3)..(3): 2'-hydroxy corresponding base
  modified_base (4)..(4): 2'-O-methyl corresponding base
  modified_base (5)..(5): 2'-hydroxy corresponding base
  modified_base (6)..(6): 2'-hydroxy corresponding base
  modified_base (7)..(7): 2'-hydroxy corresponding base
  modified_base (8)..(8): 2'-hydroxy corresponding base
  modified_base (9)..(9): 2'-hydroxy corresponding base
  modified_base (10)..(10): 2'-O-methyl corresponding base
  modified_base (11)..(11): 2'-hydroxy corresponding base
  modified_base (12)..(12): 2'-hydroxy corresponding base
  modified_base (13)..(13): 2'-O-methyl corresponding base
  modified_base (14)..(14): 2'-hydroxy corresponding base
  modified_base (15)..(15): 2'-hydroxy corresponding base
  modified_base (16)..(16): 2'-O-methyl corresponding base
  modified_base (17)..(17): 2'-hydroxy corresponding base
  modified_base (18)..(18): 2'-hydroxy corresponding base
  modified_base (19)..(19): 2'-hydroxy corresponding base
  modified_base (20)..(20): deoxythymidine
  modified_base (21)..(21): 5'-thio thymidine
acgcaaggcuagcaccagctt

SEQ ID NO: 95 - DNA, 21 bp, Artificial Sequence
  Description of Artificial Sequence: Synthetic oligonucleotide
  Description of Combined DNA/RNA Molecule: Synthetic oligonucleotide
  siRNAs to PCSK9
  modified_base (1)..(1): 2'-hydroxy corresponding base
  modified_base (2)..(2): 2'-hydroxy corresponding base
  modified_base (3)..(3): 2'-hydroxy corresponding base
  modified_base (4)..(4): 2'-hydroxy corresponding base
  modified_base (5)..(5): 2'-hydroxy corresponding base
  modified_base (6)..(6): 2'-hydroxy corresponding base
  modified_base (7)..(7): 2'-hydroxy corresponding base
  modified_base (8)..(8): 2'-hydroxy corresponding base
  modified_base (9)..(9): 2'-hydroxy corresponding base
  modified_base (10)..(10): 2'-hydroxy corresponding base
  modified_base (11)..(11): 2'-hydroxy corresponding base
  modified_base (12)..(12): 2'-hydroxy corresponding base
  modified_base (13)..(13): 2'-hydroxy corresponding base
  modified_base (14)..(14): 2'-hydroxy corresponding base
  modified_base (15)..(15): 2'-hydroxy corresponding base
  modified_base (16)..(16): 2'-hydroxy corresponding base
  modified_base (17)..(17): 2'-hydroxy corresponding base
  modified_base (18)..(18): 2'-hydroxy corresponding base
  modified_base (19)..(19): 2'-hydroxy corresponding base
  modified_base (20)..(20): deoxythymidine
  modified_base (21)..(21): 5'-thio thymidine
cuggugcuagccuugcguutt

SEQ ID NO: 96 - DNA, 21 bp, Artificial Sequence
  Description of Artificial Sequence: Synthetic oligonucleotide
  Description of Combined DNA/RNA Molecule: Synthetic oligonucleotide
  siRNAs to PCSK9
  modified_base (1)..(1): 2'-hydroxy corresponding base
  modified_base (2)..(2): 2'-hydroxy corresponding base
  modified_base (3)..(3): 2'-hydroxy corresponding base
  modified_base (4)..(4): 2'-hydroxy corresponding base
  modified_base (5)..(5): 2'-hydroxy corresponding base
  modified_base (6)..(6): 2'-hydroxy corresponding base
  modified_base (7)..(7): 2'-hydroxy corresponding base
  modified_base (8)..(8): 2'-hydroxy corresponding base
  modified_base (9)..(9): 2'-hydroxy corresponding base
  modified_base (10)..(10): 2'-hydroxy corresponding base
  modified_base (11)..(11): 2'-hydroxy corresponding base
  modified_base (12)..(12): 2'-hydroxy corresponding base
  modified_base (13)..(13): 2'-hydroxy corresponding base
  modified_base (14)..(14): 2'-hydroxy corresponding base
  modified_base (15)..(15): 2'-hydroxy corresponding base
  modified_base (16)..(16): 2'-hydroxy corresponding base
  modified_base (17)..(17): 2'-hydroxy corresponding base
  modified_base (18)..(18): 2'-hydroxy corresponding base
  modified_base (19)..(19): 2'-hydroxy corresponding base
  modified_base (20)..(20): deoxythymidine
  modified_base (21)..(21): 5'-thio thymidine
aacgcaaggcuagcaccagtt

SEQ ID NO: 97 - DNA, 21 bp, Artificial Sequence
  Description of Artificial Sequence: Synthetic oligonucleotide
  Description of Combined DNA/RNA Molecule: Synthetic oligonucleotide
  siRNAs to PCSK9
  modified_base (1)..(1): 2'-hydroxy corresponding base
  modified_base (2)..(2): 2'-hydroxy corresponding base
  modified_base (3)..(3): 2'-hydroxy corresponding base
  modified_base (4)..(4): 2'-hydroxy corresponding base
  modified_base (5)..(5): 2'-hydroxy corresponding base
  modified_base (6)..(6): 2'-hydroxy corresponding base
  modified_base (7)..(7): 2'-hydroxy corresponding base
  modified_base (8)..(8): 2'-hydroxy corresponding base
  modified_base (9)..(9): 2'-hydroxy corresponding base
  modified_base (10)..(10): 2'-hydroxy corresponding base
  modified_base (11)..(11): 2'-hydroxy corresponding base
  modified_base (12)..(12): 2'-hydroxy corresponding base
  modified_base (13)..(13): 2'-hydroxy corresponding base
  modified_base (14)..(14): 2'-hydroxy corresponding base
  modified_base (15)..(15): 2'-hydroxy corresponding base
  modified_base (16)..(16): 2'-hydroxy corresponding base
  modified_base (17)..(17): 2'-hydroxy corresponding base
  modified_base (18)..(18): 2'-hydroxy corresponding base
  modified_base (19)..(19): 2'-hydroxy corresponding base
  modified_base (20)..(20): deoxythymidine
  modified_base (21)..(21): 5'-thio thymidine
cuggugcuagccuugcguutt

SEQ ID NO: 98 - DNA, 21 bp, Artificial Sequence
  Description of Artificial Sequence: Synthetic oligonucleotide
  Description of Combined DNA/RNA Molecule: Synthetic oligonucleotide
  siRNAs to PCSK9
  modified_base (1)..(1): 2'-hydroxy corresponding base
  modified_base (2)..(2): 2'-hydroxy corresponding base
  modified_base (3)..(3): 2'-hydroxy corresponding base
  modified_base (4)..(4): 2'-hydroxy corresponding base
  modified_base (5)..(5): 2'-hydroxy corresponding base
  modified_base (6)..(6): 2'-hydroxy corresponding base
  modified_base (7)..(7): 2'-hydroxy corresponding base
  modified_base (8)..(8): 2'-hydroxy corresponding base
  modified_base (9)..(9): 2'-hydroxy corresponding base
  modified_base (10)..(10): 2'-hydroxy corresponding base
  modified_base (11)..(11): 2'-hydroxy corresponding base
  modified_base (12)..(12): 2'-hydroxy corresponding base
  modified_base (13)..(13): 2'-hydroxy corresponding base
  modified_base (14)..(14): 2'-hydroxy corresponding base
  modified_base (15)..(15): 2'-hydroxy corresponding base
  modified_base (16)..(16): 2'-hydroxy corresponding base
  modified_base (17)..(17): 2'-hydroxy corresponding base
  modified_base (18)..(18): 2'-hydroxy corresponding base
  modified_base (19)..(19): 2'-hydroxy corresponding base
  modified_base (20)..(20): deoxythymidine
  modified_base (21)..(21): 5'-thio thymidine
aacgcaaggcuagcaccagtt

SEQ ID NO: 99 - DNA, 21 bp, Artificial Sequence
  Description of Artificial Sequence: Synthetic oligonucleotide
  Description of Combined DNA/RNA Molecule: Synthetic oligonucleotide
  siRNAs to PCSK9
  modified_base (1)..(1): 2'-O-methyl corresponding base
  modified_base (2)..(2): 2'-O-methyl corresponding base
  modified_base (3)..(3): 2'-hydroxy corresponding base
  modified_base (4)..(4): 2'-hydroxy corresponding base
  modified_base (5)..(5): 2'-O-methyl corresponding base
  modified_base (6)..(6): 2'-hydroxy corresponding base
  modified_base (7)..(7): 2'-O-methyl corresponding base
  modified_base (8)..(8): 2'-O-methyl corresponding base
  modified_base (9)..(9): 2'-hydroxy corresponding base
  modified_base (10)..(10): 2'-hydroxy corresponding base
  modified_base (11)..(11): 2'-O-methyl corresponding base
  modified_base (12)..(12): 2'-O-methyl corresponding base
  modified_base (13)..(13): 2'-O-methyl corresponding base
  modified_base (14)..(14): 2'-O-methyl corresponding base
  modified_base (15)..(15): 2'-hydroxy corresponding base
  modified_base (16)..(16): 2'-O-methyl corresponding base
  modified_base (17)..(17): 2'-hydroxy corresponding base
  modified_base (18)..(18): 2'-O-methyl corresponding base
  modified_base (19)..(19): 2'-O-methyl corresponding base
  modified_base (20)..(20): deoxythymidine
  modified_base (21)..(21): 5'-thio thymidine
cuggugcuagccuugcguutt

SEQ ID NO: 100 - DNA, 21 bp, Artificial Sequence
  Description of Artificial Sequence: Synthetic oligonucleotide
  Description of Combined DNA/RNA Molecule: Synthetic oligonucleotide
  siRNAs to PCSK9
  modified_base (1)..(1): 2'-hydroxy corresponding base
  modified_base (2)..(2): 2'-hydroxy corresponding base
  modified_base (3)..(3): 2'-hydroxy corresponding base
  modified_base (4)..(4): 2'-hydroxy corresponding base
  modified_base (5)..(5): 2'-O-methyl corresponding base
  modified_base (6)..(6): 2'-hydroxy corresponding base
  modified_base (7)..(7): 2'-hydroxy corresponding base
  modified_base (8)..(8): 2'-hydroxy corresponding base
  modified_base (9)..(9): 2'-hydroxy corresponding base
  modified_base (10)..(10): 2'-hydroxy corresponding base
  modified_base (11)..(11): 2'-O-methyl corresponding base
  modified_base (12)..(12): 2'-hydroxy corresponding base
  modified_base (13)..(13): 2'-hydroxy corresponding base
  modified_base (14)..(14): 2'-O-methyl corresponding base
  modified_base (15)..(15): 2'-hydroxy corresponding base
  modified_base (16)..(16): 2'-hydroxy corresponding base
  modified_base (17)..(17): 2'-O-methyl corresponding base
  modified_base (18)..(18): 2'-hydroxy corresponding base
  modified_base (19)..(19): 2'-hydroxy corresponding base
  modified_base (20)..(20): deoxythymidine
  modified_base (21)..(21): 5'-thio thymidine
aacgcaaggcuagcaccagtt

SEQ ID NO: 101 - DNA, 21 bp, Artificial Sequence
  Description of Artificial Sequence: Synthetic oligonucleotide
  Description of Combined DNA/RNA Molecule: Synthetic oligonucleotide
  siRNAs to PCSK9
  modified_base (1)..(1): 2'-hydroxy corresponding base
  modified_base (2)..(2): 2'-hydroxy corresponding base
  modified_base (3)..(3): 2'-hydroxy corresponding base
  modified_base (4)..(4): 2'-hydroxy corresponding base
  modified_base (5)..(5): 2'-hydroxy corresponding base
  modified_base (6)..(6): 2'-hydroxy corresponding base
  modified_base (7)..(7): 2'-hydroxy corresponding base
  modified_base (8)..(8): 2'-hydroxy corresponding base
  modified_base (9)..(9): 2'-hydroxy corresponding base
  modified_base (10)..(10): 2'-hydroxy corresponding base
  modified_base (11)..(11): 2'-hydroxy corresponding base
  modified_base (12)..(12): 2'-hydroxy corresponding base
  modified_base (13)..(13): 2'-hydroxy corresponding base
  modified_base (14)..(14): 2'-hydroxy corresponding base
  modified_base (15)..(15): 2'-hydroxy corresponding base
  modified_base (16)..(16): 2'-hydroxy corresponding base
  modified_base (17)..(17): 2'-hydroxy corresponding base
  modified_base (18)..(18): 2'-hydroxy corresponding base
  modified_base (19)..(19): 2'-hydroxy corresponding base
  modified_base (20)..(20): deoxythymidine
  modified_base (21)..(21): 5'-thio thymidine
ugcuagccuugcguuccgatt

SEQ ID NO: 102 - DNA, 21 bp, Artificial Sequence
  Description of Artificial Sequence: Synthetic oligonucleotide
  Description of Combined DNA/RNA Molecule: Synthetic oligonucleotide
  siRNAs to PCSK9
  modified_base (1)..(1): 2'-hydroxy corresponding base
  modified_base (2)..(2): 2'-hydroxy corresponding base
  modified_base (3)..(3): 2'-hydroxy corresponding base
  modified_base (4)..(4): 2'-hydroxy corresponding base
  modified_base (5)..(5): 2'-hydroxy corresponding base
  modified_base (6)..(6): 2'-hydroxy corresponding base
  modified_base (7)..(7): 2'-hydroxy corresponding base
  modified_base (8)..(8): 2'-hydroxy corresponding base
  modified_base (9)..(9): 2'-hydroxy corresponding base
  modified_base (10)..(10): 2'-hydroxy corresponding base
  modified_base (11)..(11): 2'-hydroxy corresponding base
  modified_base (12)..(12): 2'-hydroxy corresponding base
  modified_base (13)..(13): 2'-hydroxy corresponding base
  modified_base (14)..(14): 2'-hydroxy corresponding base
  modified_base (15)..(15): 2'-hydroxy corresponding base
  modified_base (16)..(16): 2'-hydroxy corresponding base
  modified_base (17)..(17): 2'-hydroxy corresponding base
  modified_base (18)..(18): 2'-hydroxy corresponding base
  modified_base (19)..(19): 2'-hydroxy corresponding base
  modified_base (20)..(20): deoxythymidine
  modified_base (21)..(21): 5'-thio thymidine
ucggaacgcaaggcuagcatt

SEQ ID NO: 103 - DNA, 21 bp, Artificial Sequence
  Description of Artificial Sequence: Synthetic oligonucleotide
  Description of Combined DNA/RNA Molecule: Synthetic oligonucleotide
  siRNAs to PCSK9
  modified_base (1)..(1): 2'-O-methyl corresponding base
  modified_base (2)..(2): 2'-hydroxy corresponding base
  modified_base (3)..(3): 2'-O-methyl corresponding base
  modified_base (4)..(4): 2'-O-methyl corresponding base
  modified_base (5)..(5): 2'-hydroxy corresponding base
  modified_base (6)..(6): 2'-hydroxy corresponding base
  modified_base (7)..(7): 2'-O-methyl corresponding base
  modified_base (8)..(8): 2'-O-methyl corresponding base
  modified_base (9)..(9): 2'-O-methyl corresponding base
  modified_base (10)..(10): 2'-O-methyl corresponding base
  modified_base (11)..(11): 2'-hydroxy corresponding base
  modified_base (12)..(12): 2'-O-methyl corresponding base
  modified_base (13)..(13): 2'-hydroxy corresponding base
  modified_base (14)..(14): 2'-O-methyl corresponding base
  modified_base (15)..(15): 2'-O-methyl corresponding base
  modified_base (16)..(16): 2'-O-methyl corresponding base
  modified_base (17)..(17): 2'-O-methyl corresponding base
  modified_base (18)..(18): 2'-hydroxy corresponding base
  modified_base (19)..(19): 2'-hydroxy corresponding base
  modified_base (20)..(20): deoxythymidine
  modified_base (21)..(21): 5'-thio thymidine
ugcuagccuugcguuccgatt

SEQ ID NO: 104 - DNA, 21 bp, Artificial Sequence
  Description of Artificial Sequence: Synthetic oligonucleotide
  Description of Combined DNA/RNA Molecule: Synthetic oligonucleotide
  siRNAs to PCSK9
  modified_base (1)..(1): 2'-hydroxy corresponding base
  modified_base (2)..(2): 2'-hydroxy corresponding base
  modified_base (3)..(3): 2'-hydroxy corresponding base
  modified_base (4)..(4): 2'-hydroxy corresponding base
  modified_base (5)..(5): 2'-hydroxy corresponding base
  modified_base (6)..(6): 2'-hydroxy corresponding base
  modified_base (7)..(7): 2'-hydroxy corresponding base
  modified_base (8)..(8): 2'-hydroxy corresponding base
  modified_base (9)..(9): 2'-O-methyl corresponding base
  modified_base (10)..(10): 2'-hydroxy corresponding base
  modified_base (11)..(11): 2'-hydroxy corresponding base
  modified_base (12)..(12): 2'-hydroxy corresponding base
  modified_base (13)..(13): 2'-hydroxy corresponding base
  modified_base (14)..(14): 2'-hydroxy corresponding base
  modified_base (15)..(15): 2'-O-methyl corresponding base
  modified_base (16)..(16): 2'-hydroxy corresponding base
  modified_base (17)..(17): 2'-hydroxy corresponding base
  modified_base (18)..(18): 2'-O-methyl corresponding base
  modified_base (19)..(19): 2'-hydroxy corresponding base
  modified_base (20)..(20): deoxythymidine
  modified_base (21)..(21): 5'-thio thymidine
ucggaacgcaaggcuagcatt

SEQ ID NO: 105 - DNA, 21 bp, Artificial Sequence
  Description of Artificial Sequence: Synthetic oligonucleotide
  Description of Combined DNA/RNA Molecule: Synthetic oligonucleotide
  siRNAs to PCSK9
  modified_base (1)..(1): 2'-hydroxy corresponding base
  modified_base (2)..(2): 2'-hydroxy corresponding base
  modified_base (3)..(3): 2'-hydroxy corresponding base
  modified_base (4)..(4): 2'-hydroxy corresponding base
  modified_base (5)..(5): 2'-hydroxy corresponding base
  modified_base (6)..(6): 2'-hydroxy corresponding base
  modified_base (7)..(7): 2'-hydroxy corresponding base
  modified_base (8)..(8): 2'-hydroxy corresponding base
  modified_base (9)..(9): 2'-hydroxy corresponding base
  modified_base (10)..(10): 2'-hydroxy corresponding base
  modified_base (11)..(11): 2'-hydroxy corresponding base
  modified_base (12)..(12): 2'-hydroxy corresponding base
  modified_base (13)..(13): 2'-hydroxy corresponding base
  modified_base (14)..(14): 2'-hydroxy corresponding base
  modified_base (15)..(15): 2'-hydroxy corresponding base
  modified_base (16)..(16): 2'-hydroxy corresponding base
  modified_base (17)..(17): 2'-hydroxy corresponding base
  modified_base (18)..(18): 2'-hydroxy corresponding base
  modified_base (19)..(19): 2'-hydroxy corresponding base
  modified_base (20)..(20): deoxythymidine
  modified_base (21)..(21): 5'-thio thymidine
uagccuugcguuccgaggatt

SEQ ID NO: 106 - DNA, 21 bp, Artificial Sequence
  Description of Artificial Sequence: Synthetic oligonucleotide
  Description of Combined DNA/RNA Molecule: Synthetic oligonucleotide
  siRNAs to PCSK9
  modified_base (1)..(1): 2'-hydroxy corresponding base
  modified_base (2)..(2): 2'-hydroxy corresponding base
  modified_base (3)..(3): 2'-hydroxy corresponding base
  modified_base (4)..(4): 2'-hydroxy corresponding base
  modified_base (5)..(5): 2'-hydroxy corresponding base
  modified_base (6)..(6): 2'-hydroxy corresponding base
  modified_base (7)..(7): 2'-hydroxy corresponding base
  modified_base (8)..(8): 2'-hydroxy corresponding base
  modified_base (9)..(9): 2'-hydroxy corresponding base
  modified_base (10)..(10): 2'-hydroxy corresponding base
  modified_base (11)..(11): 2'-hydroxy corresponding base
  modified_base (12)..(12): 2'-hydroxy corresponding base
  modified_base (13)..(13): 2'-hydroxy corresponding base
  modified_base (14)..(14): 2'-hydroxy corresponding base
  modified_base (15)..(15): 2'-hydroxy corresponding base
  modified_base (16)..(16): 2'-hydroxy corresponding base
  modified_base (17)..(17): 2'-hydroxy corresponding base
  modified_base (18)..(18): 2'-hydroxy corresponding base
  modified_base (19)..(19): 2'-hydroxy corresponding base
  modified_base (20)..(20): deoxythymidine
  modified_base (21)..(21): 5'-thio thymidine
uccucggaacgcaaggcuatt

SEQ ID NO: 107 - DNA, 21 bp, Artificial Sequence
  Description of Artificial Sequence: Synthetic oligonucleotide
  Description of Combined DNA/RNA Molecule: Synthetic oligonucleotide
  siRNAs to PCSK9
  modified_base (1)..(1): 2'-O-methyl corresponding base
  modified_base (2)..(2): 2'-hydroxy corresponding base
  modified_base (3)..(3): 2'-hydroxy corresponding base
  modified_base (4)..(4): 2'-O-methyl corresponding base
  modified_base (5)..(5): 2'-O-methyl corresponding base
  modified_base (6)..(6): 2'-O-methyl corresponding base
  modified_base (7)..(7): 2'-O-methyl corresponding base
  modified_base (8)..(8): 2'-hydroxy corresponding base
  modified_base (9)..(9): 2'-O-methyl corresponding base
  modified_base (10)..(10): 2'-hydroxy corresponding base
  modified_base (11)..(11): 2'-O-methyl corresponding base
  modified_base (12)..(12): 2'-O-methyl corresponding base
  modified_base (13)..(13): 2'-O-methyl corresponding base
  modified_base (14)..(14): 2'-O-methyl corresponding base
  modified_base (15)..(15): 2'-hydroxy corresponding base
  modified_base (16)..(16): 2'-hydroxy corresponding base
  modified_base (17)..(17): 2'-hydroxy corresponding base
  modified_base (18)..(18): 2'-hydroxy corresponding base
  modified_base (19)..(19): 2'-hydroxy corresponding base
  modified_base (20)..(20): deoxythymidine
  modified_base (21)..(21): 5'-thio thymidine
uagccuugcguuccgaggatt

SEQ ID NO: 108 - DNA, 21 bp, Artificial Sequence
  Description of Artificial Sequence: Synthetic oligonucleotide
  Description of Combined DNA/RNA Molecule: Synthetic oligonucleotide
  siRNAs to PCSK9
  modified_base (1)..(1): 2'-hydroxy corresponding base
  modified_base (2)..(2): 2'-hydroxy corresponding base
  modified_base (3)..(3): 2'-hydroxy corresponding base
  modified_base (4)..(4): 2'-hydroxy corresponding base
  modified_base (5)..(5): 2'-hydroxy corresponding base
  modified_base (6)..(6): 2'-hydroxy corresponding base
  modified_base (7)..(7): 2'-hydroxy corresponding base
  modified_base (8)..(8): 2'-hydroxy corresponding base
  modified_base (9)..(9): 2'-hydroxy corresponding base
  modified_base (10)..(10): 2'-hydroxy corresponding base
  modified_base (11)..(11): 2'-hydroxy corresponding base
  modified_base (12)..(12): 2'-O-methyl corresponding base
  modified_base (13)..(13): 2'-hydroxy corresponding base
  modified_base (14)..(14): 2'-hydroxy corresponding base
  modified_base (15)..(15): 2'-hydroxy corresponding base
  modified_base (16)..(16): 2'-hydroxy corresponding base
  modified_base (17)..(17): 2'-hydroxy corresponding base
  modified_base (18)..(18): 2'-O-methyl corresponding base
  modified_base (19)..(19): 2'-hydroxy corresponding base
  modified_base (20)..(20): deoxythymidine
  modified_base (21)..(21): 5'-thio thymidine
uccucggaacgcaaggcuatt

SEQ ID NO: 109 - DNA, 21 bp, Artificial Sequence
  Description of Artificial Sequence: Synthetic oligonucleotide
  Description of Combined DNA/RNA Molecule: Synthetic oligonucleotide
  siRNAs to PCSK9
  modified_base (1)..(1): 2'-hydroxy corresponding base
  modified_base (2)..(2): 2'-hydroxy corresponding base
  modified_base (3)..(3): 2'-hydroxy corresponding base
  modified_base (4)..(4): 2'-hydroxy corresponding base
  modified_base (5)..(5): 2'-hydroxy corresponding base
  modified_base (6)..(6): 2'-hydroxy corresponding base
  modified_base (7)..(7): 2'-hydroxy corresponding base
  modified_base (8)..(8): 2'-hydroxy corresponding base
  modified_base (9)..(9): 2'-hydroxy corresponding base
  modified_base (10)..(10): 2'-hydroxy corresponding base
  modified_base (11)..(11): 2'-hydroxy corresponding base
  modified_base (12)..(12): 2'-hydroxy corresponding base
  modified_base (13)..(13): 2'-hydroxy corresponding base
  modified_base (14)..(14): 2'-hydroxy corresponding base
  modified_base (15)..(15): 2'-hydroxy corresponding base
  modified_base (16)..(16): 2'-hydroxy corresponding base
  modified_base (17)..(17): 2'-hydroxy corresponding base
  modified_base (18)..(18): 2'-hydroxy corresponding base
  modified_base (19)..(19): 2'-hydroxy corresponding base
  modified_base (20)..(20): deoxythymidine
  modified_base (21)..(21): deoxythymidine
gacggccuggccgaagcactt

SEQ ID NO: 110 - DNA, 21 bp, Artificial Sequence
  Description of Artificial Sequence: Synthetic oligonucleotide
  Description of Combined DNA/RNA Molecule: Synthetic oligonucleotide
  siRNAs to PCSK9
  modified_base (1)..(1): 2'-hydroxy corresponding base
  modified_base (2)..(2): 2'-hydroxy corresponding base
  modified_base (3)..(3): 2'-hydroxy corresponding base
  modified_base (4)..(4): 2'-hydroxy corresponding base
  modified_base (5)..(5): 2'-hydroxy corresponding base
  modified_base (6)..(6): 2'-hydroxy corresponding base
  modified_base (7)..(7): 2'-hydroxy corresponding base
  modified_base (8)..(8): 2'-hydroxy corresponding base
  modified_base (9)..(9): 2'-hydroxy corresponding base
  modified_base (10)..(10): 2'-hydroxy corresponding base
  modified_base (11)..(11): 2'-hydroxy corresponding base
  modified_base (12)..(12): 2'-hydroxy corresponding base
  modified_base (13)..(13): 2'-hydroxy corresponding base
  modified_base (14)..(14): 2'-hydroxy corresponding base
  modified_base (15)..(15): 2'-hydroxy corresponding base
  modified_base (16)..(16): 2'-hydroxy corresponding base
  modified_base (17)..(17): 2'-hydroxy corresponding base
  modified_base (18)..(18): 2'-hydroxy corresponding base
  modified_base (19)..(19): 2'-hydroxy corresponding base
  modified_base (20)..(20): deoxythymidine
  modified_base (21)..(21): deoxythymidine
gugcuucggccaggccguctt

SEQ ID NO: 111 - DNA, 21 bp, Artificial Sequence
  Description of Artificial Sequence: Synthetic oligonucleotide
  Description of Combined DNA/RNA Molecule: Synthetic oligonucleotide
  siRNAs to PCSK9
  modified_base (1)..(1): 2'-hydroxy corresponding base
  modified_base (2)..(2): 2'-hydroxy corresponding base
  modified_base (3)..(3): 2'-hydroxy corresponding base
  modified_base (4)..(4): 2'-hydroxy corresponding base
  modified_base (5)..(5): 2'-hydroxy corresponding base
  modified_base (6)..(6): 2'-hydroxy corresponding base
  modified_base (7)..(7): 2'-hydroxy corresponding base
  modified_base (8)..(8): 2'-hydroxy corresponding base
  modified_base (9)..(9): 2'-hydroxy corresponding base
  modified_base (10)..(10): 2'-hydroxy corresponding base
  modified_base (11)..(11): 2'-hydroxy corresponding base
  modified_base (12)..(12): 2'-hydroxy corresponding base
  modified_base (13)..(13): 2'-hydroxy corresponding base
  modified_base (14)..(14): 2'-hydroxy corresponding base
  modified_base (15)..(15): 2'-hydroxy corresponding base
  modified_base (16)..(16): 2'-hydroxy corresponding base
  modified_base (17)..(17): 2'-hydroxy corresponding base
  modified_base (18)..(18): 2'-hydroxy corresponding base
  modified_base (19)..(19): 2'-hydroxy corresponding base
  modified_base (20)..(20): deoxythymidine
  modified_base (21)..(21): deoxythymidine
ggccgaagcacccgagcactt

SEQ ID NO: 112 - DNA, 21 bp, Artificial Sequence
  Description of Artificial Sequence: Synthetic oligonucleotide
  Description of Combined DNA/RNA Molecule: Synthetic oligonucleotide
  siRNAs to PCSK9
  modified_base (1)..(1): 2'-hydroxy corresponding base
  modified_base (2)..(2): 2'-hydroxy corresponding base
  modified_base (3)..(3): 2'-hydroxy corresponding base
  modified_base (4)..(4): 2'-hydroxy corresponding base
  modified_base (5)..(5): 2'-hydroxy corresponding base
  modified_base (6)..(6): 2'-hydroxy corresponding base
  modified_base (7)..(7): 2'-hydroxy corresponding base
  modified_base (8)..(8): 2'-hydroxy corresponding base
  modified_base (9)..(9): 2'-hydroxy corresponding base
  modified_base (10)..(10): 2'-hydroxy corresponding base
  modified_base (11)..(11): 2'-hydroxy corresponding base
  modified_base (12)..(12): 2'-hydroxy corresponding base
  modified_base (13)..(13): 2'-hydroxy corresponding base
  modified_base (14)..(14): 2'-hydroxy corresponding base
  modified_base (15)..(15): 2'-hydroxy corresponding base
  modified_base (16)..(16): 2'-hydroxy corresponding base
  modified_base (17)..(17): 2'-hydroxy corresponding base
  modified_base (18)..(18): 2'-hydroxy corresponding base
  modified_base (19)..(19): 2'-hydroxy corresponding base
  modified_base (20)..(20): deoxythymidine
  modified_base (21)..(21): deoxythymidine
gugcucgggugcuucggcctt

SEQ ID NO: 113 - DNA, 21 bp, Artificial Sequence
  Description of Artificial Sequence: Synthetic oligonucleotide
  Description of Combined DNA/RNA Molecule: Synthetic oligonucleotide
  siRNAs to PCSK9
  modified_base (1)..(1): 2'-hydroxy corresponding base
  modified_base (2)..(2): 2'-hydroxy corresponding base
  modified_base (3)..(3): 2'-hydroxy corresponding base
  modified_base (4)..(4): 2'-hydroxy corresponding base
  modified_base (5)..(5): 2'-hydroxy corresponding base
  modified_base (6)..(6): 2'-hydroxy corresponding base
  modified_base (7)..(7): 2'-hydroxy corresponding base
  modified_base (8)..(8): 2'-hydroxy corresponding base
  modified_base (9)..(9): 2'-hydroxy corresponding base
  modified_base (10)..(10): 2'-hydroxy corresponding base
  modified_base (11)..(11): 2'-hydroxy corresponding base
  modified_base (12)..(12): 2'-hydroxy corresponding base
  modified_base (13)..(13): 2'-hydroxy corresponding base
  modified_base (14)..(14): 2'-hydroxy corresponding base
  modified_base (15)..(15): 2'-hydroxy corresponding base
  modified_base (16)..(16): 2'-hydroxy corresponding base
  modified_base (17)..(17): 2'-hydroxy corresponding base
  modified_base (18)..(18): 2'-hydroxy corresponding base
  modified_base (19)..(19): 2'-hydroxy corresponding base
  modified_base (20)..(20): deoxythymidine
  modified_base (21)..(21): deoxythymidine
gccgaagcacccgagcacgtt

SEQ ID NO: 114 - DNA, 21 bp, Artificial Sequence
  Description of Artificial Sequence: Synthetic oligonucleotide
  Description of Combined DNA/RNA Molecule: Synthetic oligonucleotide
  siRNAs to PCSK9
  modified_base (1)..(1): 2'-hydroxy corresponding base
  modified_base (2)..(2): 2'-hydroxy corresponding base
  modified_base (3)..(3): 2'-hydroxy corresponding base
  modified_base (4)..(4): 2'-hydroxy corresponding base
  modified_base (5)..(5): 2'-hydroxy corresponding base
  modified_base (6)..(6): 2'-hydroxy corresponding base
  modified_base (7)..(7): 2'-hydroxy corresponding base
  modified_base (8)..(8): 2'-hydroxy corresponding base
  modified_base (9)..(9): 2'-hydroxy corresponding base
  modified_base (10)..(10): 2'-hydroxy corresponding base
  modified_base (11)..(11): 2'-hydroxy corresponding base
  modified_base (12)..(12): 2'-hydroxy corresponding base
  modified_base (13)..(13): 2'-hydroxy corresponding base
  modified_base (14)..(14): 2'-hydroxy corresponding base
  modified_base (15)..(15): 2'-hydroxy corresponding base
  modified_base (16)..(16): 2'-hydroxy corresponding base
  modified_base (17)..(17): 2'-hydroxy corresponding base
  modified_base (18)..(18): 2'-hydroxy corresponding base
  modified_base (19)..(19): 2'-hydroxy corresponding base
  modified_base (20)..(20): deoxythymidine
  modified_base (21)..(21): deoxythymidine
cgugcucgggugcuucggctt

SEQ ID NO: 115 - DNA, 21 bp, Artificial Sequence
  Description of Artificial Sequence: Synthetic oligonucleotide
  Description of Combined DNA/RNA Molecule: Synthetic oligonucleotide
  siRNAs to PCSK9
  modified_base (1)..(1): 2'-hydroxy corresponding base
  modified_base (2)..(2): 2'-hydroxy corresponding base
  modified_base (3)..(3): 2'-hydroxy corresponding base
  modified_base (4)..(4): 2'-hydroxy corresponding base
  modified_base (5)..(5): 2'-hydroxy corresponding base
  modified_base (6)..(6): 2'-hydroxy corresponding base
  modified_base (7)..(7): 2'-hydroxy corresponding base
  modified_base (8)..(8): 2'-hydroxy corresponding base
  modified_base (9)..(9): 2'-hydroxy corresponding base
  modified_base (10)..(10): 2'-hydroxy corresponding base
  modified_base (11)..(11): 2'-hydroxy corresponding base
  modified_base (12)..(12): 2'-hydroxy corresponding base
  modified_base (13)..(13): 2'-hydroxy corresponding base
  modified_base (14)..(14): 2'-hydroxy corresponding base
  modified_base (15)..(15): 2'-hydroxy corresponding base
  modified_base (16)..(16): 2'-hydroxy corresponding base
  modified_base (17)..(17): 2'-hydroxy corresponding base
  modified_base (18)..(18): 2'-hydroxy corresponding base
  modified_base (19)..(19): 2'-hydroxy corresponding base
  modified_base (20)..(20): deoxythymidine
  modified_base (21)..(21): deoxythymidine
ccgaagcacccgagcacggtt

SEQ ID NO: 116 - DNA, 21 bp, Artificial Sequence
  Description of Artificial Sequence: Synthetic oligonucleotide
  Description of Combined DNA/RNA Molecule: Synthetic oligonucleotide
  siRNAs to PCSK9
  modified_base (1)..(1): 2'-hydroxy corresponding base
  modified_base (2)..(2): 2'-hydroxy corresponding base
  modified_base (3)..(3): 2'-hydroxy corresponding base
  modified_base (4)..(4): 2'-hydroxy corresponding base
  modified_base (5)..(5): 2'-hydroxy corresponding base
  modified_base (6)..(6): 2'-hydroxy corresponding base
  modified_base (7)..(7): 2'-hydroxy corresponding base
  modified_base (8)..(8): 2'-hydroxy corresponding base
  modified_base (9)..(9): 2'-hydroxy corresponding base
  modified_base (10)..(10): 2'-hydroxy corresponding base
  modified_base (11)..(11): 2'-hydroxy corresponding base
  modified_base (12)..(12): 2'-hydroxy corresponding base
  modified_base (13)..(13): 2'-hydroxy corresponding base
  modified_base (14)..(14): 2'-hydroxy corresponding base
  modified_base (15)..(15): 2'-hydroxy corresponding base
  modified_base (16)..(16): 2'-hydroxy corresponding base
  modified_base (17)..(17): 2'-hydroxy corresponding base
  modified_base (18)..(18): 2'-hydroxy corresponding base
  modified_base (19)..(19): 2'-hydroxy corresponding base
  modified_base (20)..(20): deoxythymidine
  modified_base (21)..(21): deoxythymidine
ccgugcucgggugcuucggtt

SEQ ID NO: 117 - DNA, 21 bp, Artificial Sequence
  Description of Artificial Sequence: Synthetic oligonucleotide
  Description of Combined DNA/RNA Molecule: Synthetic oligonucleotide
  siRNAs to PCSK9
  modified_base (1)..(1): 2'-hydroxy corresponding base
  modified_base (2)..(2): 2'-hydroxy corresponding base
  modified_base (3)..(3): 2'-hydroxy corresponding base
  modified_base (4)..(4): 2'-hydroxy corresponding base
  modified_base (5)..(5): 2'-hydroxy corresponding base
  modified_base (6)..(6): 2'-hydroxy corresponding base
  modified_base (7)..(7): 2'-hydroxy corresponding base
  modified_base (8)..(8): 2'-hydroxy corresponding base
  modified_base (9)..(9): 2'-hydroxy corresponding base
  modified_base (10)..(10): 2'-hydroxy corresponding base
  modified_base (11)..(11): 2'-hydroxy corresponding base
  modified_base (12)..(12): 2'-hydroxy corresponding base
  modified_base (13)..(13): 2'-hydroxy corresponding base
  modified_base (14)..(14): 2'-hydroxy corresponding base
  modified_base (15)..(15): 2'-hydroxy corresponding base
  modified_base (16)..(16): 2'-hydroxy corresponding base
  modified_base (17)..(17): 2'-hydroxy corresponding base
  modified_base (18)..(18): 2'-hydroxy corresponding base
  modified_base (19)..(19): 2'-hydroxy corresponding base
  modified_base (20)..(20): deoxythymidine
  modified_base (21)..(21): deoxythymidine
ccgagcacggaaccacagctt

SEQ ID NO: 118 - DNA, 21 bp, Artificial Sequence
  Description of Artificial Sequence: Synthetic oligonucleotide
  Description of Combined DNA/RNA Molecule: Synthetic oligonucleotide
  siRNAs to PCSK9
  modified_base (1)..(1): 2'-hydroxy corresponding base
  modified_base (2)..(2): 2'-hydroxy corresponding base
  modified_base (3)..(3): 2'-hydroxy corresponding base
  modified_base (4)..(4): 2'-hydroxy corresponding base
  modified_base (5)..(5): 2'-hydroxy corresponding base
  modified_base (6)..(6): 2'-hydroxy corresponding base
  modified_base (7)..(7): 2'-hydroxy corresponding base
  modified_base (8)..(8): 2'-hydroxy corresponding base
  modified_base (9)..(9): 2'-hydroxy corresponding base
  modified_base (10)..(10): 2'-hydroxy corresponding base
  modified_base (11)..(11): 2'-hydroxy corresponding base
  modified_base (12)..(12): 2'-hydroxy corresponding base
  modified_base (13)..(13): 2'-hydroxy corresponding base
  modified_base (14)..(14): 2'-hydroxy corresponding base
  modified_base (15)..(15): 2'-hydroxy corresponding base
  modified_base (16)..(16): 2'-hydroxy corresponding base
  modified_base (17)..(17): 2'-hydroxy corresponding base
  modified_base (18)..(18): 2'-hydroxy corresponding base
  modified_base (19)..(19): 2'-hydroxy corresponding base
  modified_base (20)..(20): deoxythymidine
  modified_base (21)..(21): deoxythymidine
gcugugguuccgugcucggtt

SEQ ID NO: 119 - DNA, 21 bp, Artificial Sequence
  Description of Artificial Sequence: Synthetic oligonucleotide
  Description of Combined DNA/RNA Molecule: Synthetic oligonucleotide
  siRNAs to PCSK9
  modified_base (1)..(1): 2'-hydroxy corresponding base
  modified_base (2)..(2): 2'-hydroxy corresponding base
  modified_base (3)..(3): 2'-hydroxy corresponding base
  modified_base (4)..(4): 2'-hydroxy corresponding base
  modified_base (5)..(5): 2'-hydroxy corresponding base
  modified_base (6)..(6): 2'-hydroxy corresponding base
  modified_base (7)..(7): 2'-hydroxy corresponding base
  modified_base (8)..(8): 2'-hydroxy corresponding base
  modified_base (9)..(9): 2'-hydroxy corresponding base
  modified_base (10)..(10): 2'-hydroxy corresponding base
  modified_base (11)..(11): 2'-hydroxy corresponding base
  modified_base (12)..(12): 2'-hydroxy corresponding base
  modified_base (13)..(13): 2'-hydroxy corresponding base
  modified_base (14)..(14): 2'-hydroxy corresponding base
  modified_base (15)..(15): 2'-hydroxy corresponding base
  modified_base (16)..(16): 2'-hydroxy corresponding base
  modified_base (17)..(17): 2'-hydroxy corresponding base
  modified_base (18)..(18): 2'-hydroxy corresponding base
  modified_base (19)..(19): 2'-hydroxy corresponding base
  modified_base (20)..(20): deoxythymidine
  modified_base (21)..(21): deoxythymidine
caccgcugcgccaaggauctt

SEQ ID NO: 120 - DNA, 21 bp, Artificial Sequence
  Description of Artificial Sequence: Synthetic oligonucleotide
  Description of Combined DNA/RNA Molecule: Synthetic oligonucleotide
  siRNAs to PCSK9
  modified_base (1)..(1): 2'-hydroxy corresponding base
  modified_base (2)..(2): 2'-hydroxy corresponding base
  modified_base (3)..(3): 2'-hydroxy corresponding base
  modified_base (4)..(4): 2'-hydroxy corresponding base
  modified_base (5)..(5): 2'-hydroxy corresponding base
  modified_base (6)..(6): 2'-hydroxy corresponding base
  modified_base (7)..(7): 2'-hydroxy corresponding base
  modified_base (8)..(8): 2'-hydroxy corresponding base
  modified_base (9)..(9): 2'-hydroxy corresponding base
  modified_base (10)..(10): 2'-hydroxy corresponding base
  modified_base (11)..(11): 2'-hydroxy corresponding base
  modified_base (12)..(12): 2'-hydroxy corresponding base
  modified_base (13)..(13): 2'-hydroxy corresponding base
  modified_base (14)..(14): 2'-hydroxy corresponding base
  modified_base (15)..(15): 2'-hydroxy corresponding base
  modified_base (16)..(16): 2'-hydroxy corresponding base
  modified_base (17)..(17): 2'-hydroxy corresponding base
  modified_base (18)..(18): 2'-hydroxy corresponding base
  modified_base (19)..(19): 2'-hydroxy corresponding base
  modified_base (20)..(20): deoxythymidine
  modified_base (21)..(21): deoxythymidine
gauccuuggcgcagcggugtt

SEQ ID NO: 121 - DNA, 21 bp, Artificial Sequence
  Description of Artificial Sequence: Synthetic oligonucleotide
  Description of Combined DNA/RNA Molecule: Synthetic oligonucleotide
  siRNAs to PCSK9
  modified_base (1)..(1): 2'-hydroxy corresponding base
  modified_base (2)..(2): 2'-hydroxy corresponding base
  modified_base (3)..(3): 2'-hydroxy corresponding base
  modified_base (4)..(4): 2'-hydroxy corresponding base
  modified_base (5)..(5): 2'-hydroxy corresponding base
  modified_base (6)..(6): 2'-hydroxy corresponding base
  modified_base (7)..(7): 2'-hydroxy corresponding base
  modified_base (8)..(8): 2'-hydroxy corresponding base
  modified_base (9)..(9): 2'-hydroxy corresponding base
  modified_base (10)..(10): 2'-hydroxy corresponding base
  modified_base (11)..(11): 2'-hydroxy corresponding base
  modified_base (12)..(12): 2'-hydroxy corresponding base
  modified_base (13)..(13): 2'-hydroxy corresponding base
  modified_base (14)..(14): 2'-hydroxy corresponding base
  modified_base (15)..(15): 2'-hydroxy corresponding base
  modified_base (16)..(16): 2'-hydroxy corresponding base
  modified_base (17)..(17): 2'-hydroxy corresponding base
  modified_base (18)..(18): 2'-hydroxy corresponding base
  modified_base (19)..(19): 2'-hydroxy corresponding base
  modified_base (20)..(20): deoxythymidine
  modified_base (21)..(21): deoxythymidine
ccgcugcgccaaggauccgtt

SEQ ID NO: 122 - DNA, 21 bp, Artificial Sequence
  Description of Artificial Sequence: Synthetic oligonucleotide
  Description of Combined DNA/RNA Molecule: Synthetic oligonucleotide
  siRNAs to PCSK9
  modified_base (1)..(1): 2'-hydroxy corresponding base
  modified_base (2)..(2): 2'-hydroxy corresponding base
  modified_base (3)..(3): 2'-hydroxy corresponding base
  modified_base (4)..(4): 2'-hydroxy corresponding base
  modified_base (5)..(5): 2'-hydroxy corresponding base
  modified_base (6)..(6): 2'-hydroxy corresponding base
  modified_base (7)..(7): 2'-hydroxy corresponding base
  modified_base (8)..(8): 2'-hydroxy corresponding base
  modified_base (9)..(9): 2'-hydroxy corresponding base
  modified_base (10)..(10): 2'-hydroxy corresponding base
  modified_base (11)..(11): 2'-hydroxy corresponding base
  modified_base (12)..(12): 2'-hydroxy corresponding base
  modified_base (13)..(13): 2'-hydroxy corresponding base
  modified_base (14)..(14): 2'-hydroxy corresponding base
  modified_base (15)..(15): 2'-hydroxy corresponding base
  modified_base (16)..(16): 2'-hydroxy corresponding base
  modified_base (17)..(17): 2'-hydroxy corresponding base
  modified_base (18)..(18): 2'-hydroxy corresponding base
  modified_base (19)..(19): 2'-hydroxy corresponding base
  modified_base (20)..(20): deoxythymidine
  modified_base (21)..(21): deoxythymidine
cggauccuuggcgcagcggtt

SEQ ID NO: 123 - DNA, 21 bp, Artificial Sequence
  Description of Artificial Sequence: Synthetic oligonucleotide
  Description of Combined DNA/RNA Molecule: Synthetic oligonucleotide
  siRNAs to PCSK9
  modified_base (1)..(1): 2'-hydroxy corresponding base
  modified_base (2)..(2): 2'-hydroxy corresponding base
  modified_base (3)..(3): 2'-hydroxy corresponding base
  modified_base (4)..(4): 2'-hydroxy corresponding base
  modified_base (5)..(5): 2'-hydroxy corresponding base
  modified_base (6)..(6): 2'-hydroxy corresponding base
  modified_base (7)..(7): 2'-hydroxy corresponding base
  modified_base (8)..(8): 2'-hydroxy corresponding base
  modified_base (9)..(9): 2'-hydroxy corresponding base
  modified_base (10)..(10): 2'-hydroxy corresponding base
  modified_base (11)..(11): 2'-hydroxy corresponding base
  modified_base (12)..(12): 2'-hydroxy corresponding base
  modified_base (13)..(13): 2'-hydroxy corresponding base
  modified_base (14)..(14): 2'-hydroxy corresponding base
  modified_base (15)..(15): 2'-hydroxy corresponding base
  modified_base (16)..(16): 2'-hydroxy corresponding base
  modified_base (17)..(17): 2'-hydroxy corresponding base
  modified_base (18)..(18): 2'-hydroxy corresponding base
  modified_base (19)..(19): 2'-hydroxy corresponding base
  modified_base (20)..(20): deoxythymidine
  modified_base (21)..(21): deoxythymidine
cgcugcgccaaggauccgutt

SEQ ID NO: 124 - DNA, 21 bp, Artificial Sequence
  Description of Artificial Sequence: Synthetic oligonucleotide
  Description of Combined DNA/RNA Molecule: Synthetic oligonucleotide
  siRNAs to PCSK9
  modified_base (1)..(1): 2'-hydroxy corresponding base
  modified_base (2)..(2): 2'-hydroxy corresponding base
  modified_base (3)..(3): 2'-hydroxy corresponding base
  modified_base (4)..(4): 2'-hydroxy corresponding base
  modified_base (5)..(5): 2'-hydroxy corresponding base
  modified_base (6)..(6): 2'-hydroxy corresponding base
  modified_base (7)..(7): 2'-hydroxy corresponding base
  modified_base (8)..(8): 2'-hydroxy corresponding base
  modified_base (9)..(9): 2'-hydroxy corresponding base
  modified_base (10)..(10): 2'-hydroxy corresponding base
  modified_base (11)..(11): 2'-hydroxy corresponding base
  modified_base (12)..(12): 2'-hydroxy corresponding base
  modified_base (13)..(13): 2'-hydroxy corresponding base
  modified_base (14)..(14): 2'-hydroxy corresponding base
  modified_base (15)..(15): 2'-hydroxy corresponding base
  modified_base (16)..(16): 2'-hydroxy corresponding base
  modified_base (17)..(17): 2'-hydroxy corresponding base
  modified_base (18)..(18): 2'-hydroxy corresponding base
  modified_base (19)..(19): 2'-hydroxy corresponding base
  modified_base (20)..(20): deoxythymidine
  modified_base (21)..(21): deoxythymidine
acggauccuuggcgcagcgtt

SEQ ID NO: 125 - DNA, 21 bp, Artificial Sequence
  Description of Artificial Sequence: Synthetic oligonucleotide
  Description of Combined DNA/RNA Molecule: Synthetic oligonucleotide
  siRNAs to PCSK9
  modified_base (1)..(1): 2'-hydroxy corresponding base
  modified_base (2)..(2): 2'-hydroxy corresponding base
  modified_base (3)..(3): 2'-hydroxy corresponding base
  modified_base (4)..(4): 2'-hydroxy corresponding base
  modified_base (5)..(5): 2'-hydroxy corresponding base
  modified_base (6)..(6): 2'-hydroxy corresponding base
  modified_base (7)..(7): 2'-hydroxy corresponding base
  modified_base (8)..(8): 2'-hydroxy corresponding base
  modified_base (9)..(9): 2'-hydroxy corresponding base
  modified_base (10)..(10): 2'-hydroxy corresponding base
  modified_base (11)..(11): 2'-hydroxy corresponding base
  modified_base (12)..(12): 2'-hydroxy corresponding base
  modified_base (13)..(13): 2'-hydroxy corresponding base
  modified_base (14)..(14): 2'-hydroxy corresponding base
  modified_base (15)..(15): 2'-hydroxy corresponding base
  modified_base (16)..(16): 2'-hydroxy corresponding base
  modified_base (17)..(17): 2'-hydroxy corresponding base
  modified_base (18)..(18): 2'-hydroxy corresponding base
  modified_base (19)..(19): 2'-hydroxy corresponding base
  modified_base (20)..(20): deoxythymidine
  modified_base (21)..(21): deoxythymidine
cugcgccaaggauccguggtt

SEQ ID NO: 126 - DNA, 21 bp, Artificial Sequence
  Description of Artificial Sequence: Synthetic oligonucleotide
  Description of Combined DNA/RNA Molecule: Synthetic oligonucleotide
  siRNAs to PCSK9
  modified_base (1)..(1): 2'-hydroxy corresponding base
  modified_base (2)..(2): 2'-hydroxy corresponding base
  modified_base (3)..(3): 2'-hydroxy corresponding base
  modified_base (4)..(4): 2'-hydroxy corresponding base
  modified_base (5)..(5): 2'-hydroxy corresponding base
  modified_base (6)..(6): 2'-hydroxy corresponding base
  modified_base (7)..(7): 2'-hydroxy corresponding base
  modified_base (8)..(8): 2'-hydroxy corresponding base
  modified_base (9)..(9): 2'-hydroxy corresponding base
  modified_base (10)..(10): 2'-hydroxy corresponding base
  modified_base (11)..(11): 2'-hydroxy corresponding base
  modified_base (12)..(12): 2'-hydroxy corresponding base
  modified_base (13)..(13): 2'-hydroxy corresponding base
  modified_base (14)..(14): 2'-hydroxy corresponding base
  modified_base (15)..(15): 2'-hydroxy corresponding base
  modified_base (16)..(16): 2'-hydroxy corresponding base
  modified_base (17)..(17): 2'-hydroxy corresponding base
  modified_base (18)..(18): 2'-hydroxy corresponding base
  modified_base (19)..(19): 2'-hydroxy corresponding base
  modified_base (20)..(20): deoxythymidine
  modified_base (21)..(21): deoxythymidine
ccacggauccuuggcgcagtt

SEQ ID NO: 127 - DNA, 21 bp, Artificial Sequence
  Description of Artificial Sequence: Synthetic oligonucleotide
  Description of Combined DNA/RNA Molecule: Synthetic oligonucleotide
  siRNAs to PCSK9
  modified_base (1)..(1): 2'-hydroxy corresponding base
  modified_base (2)..(2): 2'-hydroxy corresponding base
  modified_base (3)..(3): 2'-hydroxy corresponding base
  modified_base (4)..(4): 2'-hydroxy corresponding base
  modified_base (5)..(5): 2'-hydroxy corresponding base
  modified_base (6)..(6): 2'-hydroxy corresponding base
  modified_base (7)..(7): 2'-hydroxy corresponding base
  modified_base (8)..(8): 2'-hydroxy corresponding base
  modified_base (9)..(9): 2'-hydroxy corresponding base
  modified_base (10)..(10): 2'-hydroxy corresponding base
  modified_base (11)..(11): 2'-hydroxy corresponding base
  modified_base (12)..(12): 2'-hydroxy corresponding base
  modified_base (13)..(13): 2'-hydroxy corresponding base
  modified_base (14)..(14): 2'-hydroxy corresponding base
  modified_base (15)..(15): 2'-hydroxy corresponding base
  modified_base (16)..(16): 2'-hydroxy corresponding base
  modified_base (17)..(17): 2'-hydroxy corresponding base
  modified_base (18)..(18): 2'-hydroxy corresponding base
  modified_base (19)..(19): 2'-hydroxy corresponding base
  modified_base (20)..(20): deoxythymidine
  modified_base (21)..(21): deoxythymidine
auccguggagguugccuggtt

SEQ ID NO: 128 - DNA, 21 bp, Artificial Sequence
  Description of Artificial Sequence: Synthetic oligonucleotide
  Description of Combined DNA/RNA Molecule: Synthetic oligonucleotide
  siRNAs to PCSK9
  modified_base (1)..(1): 2'-hydroxy corresponding base
  modified_base (2)..(2): 2'-hydroxy corresponding base
  modified_base (3)..(3): 2'-hydroxy corresponding base
  modified_base (4)..(4): 2'-hydroxy corresponding base
  modified_base (5)..(5): 2'-hydroxy corresponding base
  modified_base (6)..(6): 2'-hydroxy corresponding base
  modified_base (7)..(7): 2'-hydroxy corresponding base
  modified_base (8)..(8): 2'-hydroxy corresponding base
  modified_base (9)..(9): 2'-hydroxy corresponding base
  modified_base (10)..(10): 2'-hydroxy corresponding base
  modified_base (11)..(11): 2'-hydroxy corresponding base
  modified_base (12)..(12): 2'-hydroxy corresponding base
  modified_base (13)..(13): 2'-hydroxy corresponding base
  modified_base (14)..(14): 2'-hydroxy corresponding base
  modified_base (15)..(15): 2'-hydroxy corresponding base
  modified_base (16)..(16): 2'-hydroxy corresponding base
  modified_base (17)..(17): 2'-hydroxy corresponding base
  modified_base (18)..(18): 2'-hydroxy corresponding base
  modified_base (19)..(19): 2'-hydroxy corresponding base
  modified_base (20)..(20): deoxythymidine
  modified_base (21)..(21): deoxythymidine
ccaggcaaccuccacggautt

SEQ ID NO: 129 - DNA, 21 bp, Artificial Sequence
  Description of Artificial Sequence: Synthetic oligonucleotide
  Description of Combined DNA/RNA Molecule: Synthetic oligonucleotide
  siRNAs to PCSK9
  modified_base (1)..(1): 2'-hydroxy corresponding base
  modified_base (2)..(2): 2'-hydroxy corresponding base
  modified_base (3)..(3): 2'-hydroxy corresponding base
  modified_base (4)..(4): 2'-hydroxy corresponding base
  modified_base (5)..(5): 2'-hydroxy corresponding base
  modified_base (6)..(6): 2'-hydroxy corresponding base
  modified_base (7)..(7): 2'-hydroxy corresponding base
  modified_base (8)..(8): 2'-hydroxy corresponding base
  modified_base (9)..(9): 2'-hydroxy corresponding base
  modified_base (10)..(10): 2'-hydroxy corresponding base
  modified_base (11)..(11): 2'-hydroxy corresponding base
  modified_base (12)..(12): 2'-hydroxy corresponding base
  modified_base (13)..(13): 2'-hydroxy corresponding base
  modified_base (14)..(14): 2'-hydroxy corresponding base
  modified_base (15)..(15): 2'-hydroxy corresponding base
  modified_base (16)..(16): 2'-hydroxy corresponding base
  modified_base (17)..(17): 2'-hydroxy corresponding base
  modified_base (18)..(18): 2'-hydroxy corresponding base
  modified_base (19)..(19): 2'-hydroxy corresponding base
  modified_base (20)..(20): deoxythymidine
  modified_base (21)..(21): deoxythymidine
gguugccuggcaccuacgutt

SEQ ID NO: 130 - DNA, 21 bp, Artificial Sequence
  Description of Artificial Sequence: Synthetic oligonucleotide
  Description of Combined DNA/RNA Molecule: Synthetic oligonucleotide
  siRNAs to PCSK9
  modified_base (1)..(1): 2'-hydroxy corresponding base
  modified_base (2)..(2): 2'-hydroxy corresponding base
  modified_base (3)..(3): 2'-hydroxy corresponding base
  modified_base (4)..(4): 2'-hydroxy corresponding base
  modified_base (5)..(5): 2'-hydroxy corresponding base
  modified_base (6)..(6): 2'-hydroxy corresponding base
  modified_base (7)..(7): 2'-hydroxy corresponding base
  modified_base (8)..(8): 2'-hydroxy corresponding base
  modified_base (9)..(9): 2'-hydroxy corresponding base
  modified_base (10)..(10): 2'-hydroxy corresponding base
  modified_base (11)..(11): 2'-hydroxy corresponding base
  modified_base (12)..(12): 2'-hydroxy corresponding base
  modified_base (13)..(13): 2'-hydroxy corresponding base
  modified_base (14)..(14): 2'-hydroxy corresponding base
  modified_base (15)..(15): 2'-hydroxy corresponding base
  modified_base (16)..(16): 2'-hydroxy corresponding base
  modified_base (17)..(17): 2'-hydroxy corresponding base
  modified_base (18)..(18): 2'-hydroxy corresponding base
  modified_base (19)..(19): 2'-hydroxy corresponding base
  modified_base (20)..(20): deoxythymidine
  modified_base (21)..(21): deoxythymidine
acguaggugccaggcaacctt

SEQ ID NO: 131 - DNA, 21 bp, Artificial Sequence
  Description of Artificial Sequence: Synthetic oligonucleotide
  Description of Combined DNA/RNA Molecule: Synthetic oligonucleotide
  siRNAs to PCSK9
  modified_base (1)..(1): 2'-hydroxy corresponding base
  modified_base (2)..(2): 2'-hydroxy corresponding base
  modified_base (3)..(3): 2'-hydroxy corresponding base
  modified_base (4)..(4): 2'-hydroxy corresponding base
  modified_base (5)..(5): 2'-hydroxy corresponding base
  modified_base (6)..(6): 2'-hydroxy corresponding base
  modified_base (7)..(7): 2'-hydroxy corresponding base
  modified_base (8)..(8): 2'-hydroxy corresponding base
  modified_base (9)..(9): 2'-hydroxy corresponding base
  modified_base (10)..(10): 2'-hydroxy corresponding base
  modified_base (11)..(11): 2'-hydroxy corresponding base
  modified_base (12)..(12): 2'-hydroxy corresponding base
  modified_base (13)..(13): 2'-hydroxy corresponding base
  modified_base (14)..(14): 2'-hydroxy corresponding base
  modified_base (15)..(15): 2'-hydroxy corresponding base
  modified_base (16)..(16): 2'-hydroxy corresponding base
  modified_base (17)..(17): 2'-hydroxy corresponding base
  modified_base (18)..(18): 2'-hydroxy corresponding base
  modified_base (19)..(19): 2'-hydroxy corresponding base
  modified_base (20)..(20): deoxythymidine
  modified_base (21)..(21): deoxythymidine
aggagacccaccucucgcatt

SEQ ID NO: 132 - DNA, 21 bp, Artificial Sequence
  Description of Artificial Sequence: Synthetic oligonucleotide
  Description of Combined DNA/RNA Molecule: Synthetic oligonucleotide
  siRNAs to PCSK9
  modified_base (1)..(1): 2'-hydroxy corresponding base
  modified_base (2)..(2): 2'-hydroxy corresponding base
  modified_base (3)..(3): 2'-hydroxy corresponding base
  modified_base (4)..(4): 2'-hydroxy corresponding base
  modified_base (5)..(5): 2'-hydroxy corresponding base
  modified_base (6)..(6): 2'-hydroxy corresponding base
  modified_base (7)..(7): 2'-hydroxy corresponding base
  modified_base (8)..(8): 2'-hydroxy corresponding base
  modified_base (9)..(9): 2'-hydroxy corresponding base
  modified_base (10)..(10): 2'-hydroxy corresponding base
  modified_base (11)..(11): 2'-hydroxy corresponding base
  modified_base (12)..(12): 2'-hydroxy corresponding base
  modified_base (13)..(13): 2'-hydroxy corresponding base
  modified_base (14)..(14): 2'-hydroxy corresponding base
  modified_base (15)..(15): 2'-hydroxy corresponding base
  modified_base (16)..(16): 2'-hydroxy corresponding base
  modified_base (17)..(17): 2'-hydroxy corresponding base
  modified_base (18)..(18): 2'-hydroxy corresponding base
  modified_base (19)..(19): 2'-hydroxy corresponding base
  modified_base (20)..(20): deoxythymidine
  modified_base (21)..(21): deoxythymidine
ugcgagaggugggucuccutt

SEQ ID NO: 133 - DNA, 21 bp, Artificial Sequence
  Description of Artificial Sequence: Synthetic oligonucleotide
  Description of Combined DNA/RNA Molecule: Synthetic oligonucleotide
  siRNAs to PCSK9
  modified_base (1)..(1): 2'-hydroxy corresponding base
  modified_base (2)..(2): 2'-hydroxy corresponding base
  modified_base (3)..(3): 2'-hydroxy corresponding base
  modified_base (4)..(4): 2'-hydroxy corresponding base
  modified_base (5)..(5): 2'-hydroxy corresponding base
  modified_base (6)..(6): 2'-hydroxy corresponding base
  modified_base (7)..(7): 2'-hydroxy corresponding base
  modified_base (8)..(8): 2'-hydroxy corresponding base
  modified_base (9)..(9): 2'-hydroxy corresponding base
  modified_base (10)..(10): 2'-hydroxy corresponding base
  modified_base (11)..(11): 2'-hydroxy corresponding base
  modified_base (12)..(12): 2'-hydroxy corresponding base
  modified_base (13)..(13): 2'-hydroxy corresponding base
  modified_base (14)..(14): 2'-hydroxy corresponding base
  modified_base (15)..(15): 2'-hydroxy corresponding base
  modified_base (16)..(16): 2'-hydroxy corresponding base
  modified_base (17)..(17): 2'-hydroxy corresponding base
  modified_base (18)..(18): 2'-hydroxy corresponding base
  modified_base (19)..(19): 2'-hydroxy corresponding base
  modified_base (20)..(20): deoxythymidine
  modified_base (21)..(21): deoxythymidine
ggagacccaccucucgcagtt

SEQ ID NO: 134 - DNA, 21 bp, Artificial Sequence
  Description of Artificial Sequence: Synthetic oligonucleotide
  Description of Combined DNA/RNA Molecule: Synthetic oligonucleotide
  siRNAs to PCSK9
  modified_base (1)..(1): 2'-hydroxy corresponding base
  modified_base (2)..(2): 2'-hydroxy corresponding base
  modified_base (3)..(3): 2'-hydroxy corresponding base
  modified_base (4)..(4): 2'-hydroxy corresponding base
  modified_base (5)..(5): 2'-hydroxy corresponding base
  modified_base (6)..(6): 2'-hydroxy corresponding base
  modified_base (7)..(7): 2'-hydroxy corresponding base
  modified_base (8)..(8): 2'-hydroxy corresponding base
  modified_base (9)..(9): 2'-hydroxy corresponding base
  modified_base (10)..(10): 2'-hydroxy corresponding base
  modified_base (11)..(11): 2'-hydroxy corresponding base
  modified_base (12)..(12): 2'-hydroxy corresponding base
  modified_base (13)..(13): 2'-hydroxy corresponding base
  modified_base (14)..(14): 2'-hydroxy corresponding base
  modified_base (15)..(15): 2'-hydroxy corresponding base
  modified_base (16)..(16): 2'-hydroxy corresponding base
  modified_base (17)..(17): 2'-hydroxy corresponding base
  modified_base (18)..(18): 2'-hydroxy corresponding base
  modified_base (19)..(19): 2'-hydroxy corresponding base
  modified_base (20)..(20): deoxythymidine
  modified_base (21)..(21): deoxythymidine
cugcgagaggugggucucctt

SEQ ID NO: 135 - DNA, 21 bp, Artificial Sequence
  Description of Artificial Sequence: Synthetic oligonucleotide
  Description of Combined DNA/RNA Molecule: Synthetic oligonucleotide
  siRNAs to PCSK9
  modified_base (1)..(1): 2'-hydroxy corresponding base
  modified_base (2)..(2): 2'-hydroxy corresponding base
  modified_base (3)..(3): 2'-hydroxy corresponding base
  modified_base (4)..(4): 2'-hydroxy corresponding base
  modified_base (5)..(5): 2'-hydroxy corresponding base
  modified_base (6)..(6): 2'-hydroxy corresponding base
  modified_base (7)..(7): 2'-hydroxy corresponding base
  modified_base (8)..(8): 2'-hydroxy corresponding base
  modified_base (9)..(9): 2'-hydroxy corresponding base
  modified_base (10)..(10): 2'-hydroxy corresponding base
  modified_base (11)..(11): 2'-hydroxy corresponding base
  modified_base (12)..(12): 2'-hydroxy corresponding base
  modified_base (13)..(13): 2'-hydroxy corresponding base
  modified_base (14)..(14): 2'-hydroxy corresponding base
  modified_base (15)..(15): 2'-hydroxy corresponding base
  modified_base (16)..(16): 2'-hydroxy corresponding base
  modified_base (17)..(17): 2'-hydroxy corresponding base
  modified_base (18)..(18): 2'-hydroxy corresponding base
  modified_base (19)..(19): 2'-hydroxy corresponding base
  modified_base (20)..(20): deoxythymidine
  modified_base (21)..(21): deoxythymidine
gagacccaccucucgcagutt

SEQ ID NO: 136 - DNA, 21 bp, Artificial Sequence
  Description of Artificial Sequence: Synthetic oligonucleotide
  Description of Combined DNA/RNA Molecule: Synthetic oligonucleotide
  siRNAs to PCSK9
  modified_base (1)..(1): 2'-hydroxy corresponding base
  modified_base (2)..(2): 2'-hydroxy corresponding base
  modified_base (3)..(3): 2'-hydroxy corresponding base
  modified_base (4)..(4): 2'-hydroxy corresponding base
  modified_base (5)..(5): 2'-hydroxy corresponding base
  modified_base (6)..(6): 2'-hydroxy corresponding base
  modified_base (7)..(7): 2'-hydroxy corresponding base
  modified_base (8)..(8): 2'-hydroxy corresponding base
  modified_base (9)..(9): 2'-hydroxy corresponding base
  modified_base (10)..(10): 2'-hydroxy corresponding base
  modified_base (11)..(11): 2'-hydroxy corresponding base
  modified_base (12)..(12): 2'-hydroxy corresponding base
  modified_base (13)..(13): 2'-hydroxy corresponding base
  modified_base (14)..(14): 2'-hydroxy corresponding base
  modified_base (15)..(15): 2'-hydroxy corresponding base
  modified_base (16)..(16): 2'-hydroxy corresponding base
  modified_base (17)..(17): 2'-hydroxy corresponding base
  modified_base (18)..(18): 2'-hydroxy corresponding base
  modified_base (19)..(19): 2'-hydroxy corresponding base
  modified_base (20)..(20): deoxythymidine
  modified_base (21)..(21): deoxythymidine
acugcgagaggugggucuctt

SEQ ID NO: 137 - DNA, 21 bp, Artificial Sequence
  Description of Artificial Sequence: Synthetic oligonucleotide
  Description of Combined DNA/RNA Molecule: Synthetic oligonucleotide
  siRNAs to PCSK9
  modified_base (1)..(1): 2'-hydroxy corresponding base
  modified_base (2)..(2): 2'-hydroxy corresponding base
  modified_base (3)..(3): 2'-hydroxy corresponding base
  modified_base (4)..(4): 2'-hydroxy corresponding base
  modified_base (5)..(5): 2'-hydroxy corresponding base
  modified_base (6)..(6): 2'-hydroxy corresponding base
  modified_base (7)..(7): 2'-hydroxy corresponding base
  modified_base (8)..(8): 2'-hydroxy corresponding base
  modified_base (9)..(9): 2'-hydroxy corresponding base
  modified_base (10)..(10): 2'-hydroxy corresponding base
  modified_base (11)..(11): 2'-hydroxy corresponding base
  modified_base (12)..(12): 2'-hydroxy corresponding base
  modified_base (13)..(13): 2'-hydroxy corresponding base
  modified_base (14)..(14): 2'-hydroxy corresponding base
  modified_base (15)..(15): 2'-hydroxy corresponding base
  modified_base (16)..(16): 2'-hydroxy corresponding base
  modified_base (17)..(17): 2'-hydroxy corresponding base
  modified_base (18)..(18): 2'-hydroxy corresponding base
  modified_base (19)..(19): 2'-hydroxy corresponding base
  modified_base (20)..(20): deoxythymidine
  modified_base (21)..(21): deoxythymidine
ccaccucucgcagucagagtt

SEQ ID NO: 138 - DNA, 21 bp, Artificial Sequence
  Description of Artificial Sequence: Synthetic oligonucleotide
  Description of Combined DNA/RNA Molecule: Synthetic oligonucleotide
  siRNAs to PCSK9
  modified_base (1)..(1): 2'-hydroxy corresponding base
  modified_base (2)..(2): 2'-hydroxy corresponding base
  modified_base (3)..(3): 2'-hydroxy corresponding base
  modified_base (4)..(4): 2'-hydroxy corresponding base
  modified_base (5)..(5): 2'-hydroxy corresponding base
  modified_base (6)..(6): 2'-hydroxy corresponding base
  modified_base (7)..(7): 2'-hydroxy corresponding base
  modified_base (8)..(8): 2'-hydroxy corresponding base
  modified_base (9)..(9): 2'-hydroxy corresponding base
  modified_base (10)..(10): 2'-hydroxy corresponding base
  modified_base (11)..(11): 2'-hydroxy corresponding base
  modified_base (12)..(12): 2'-hydroxy corresponding base
  modified_base (13)..(13): 2'-hydroxy corresponding base
  modified_base (14)..(14): 2'-hydroxy corresponding base
  modified_base (15)..(15): 2'-hydroxy corresponding base
  modified_base (16)..(16): 2'-hydroxy corresponding base
  modified_base (17)..(17): 2'-hydroxy corresponding base
  modified_base (18)..(18): 2'-hydroxy corresponding base
  modified_base (19)..(19): 2'-hydroxy corresponding base
  modified_base (20)..(20): deoxythymidine
  modified_base (21)..(21): deoxythymidine
cucugacugcgagagguggtt

SEQ ID NO: 139 - DNA, 21 bp, Artificial Sequence
  Description of Artificial Sequence: Synthetic oligonucleotide
  Description of Combined DNA/RNA Molecule: Synthetic oligonucleotide
  siRNAs to PCSK9
  modified_base (1)..(1): 2'-hydroxy corresponding base
  modified_base (2)..(2): 2'-hydroxy corresponding base
  modified_base (3)..(3): 2'-hydroxy corresponding base
  modified_base (4)..(4): 2'-hydroxy corresponding base
  modified_base (5)..(5): 2'-hydroxy corresponding base
  modified_base (6)..(6): 2'-hydroxy corresponding base
  modified_base (7)..(7): 2'-hydroxy corresponding base
  modified_base (8)..(8): 2'-hydroxy corresponding base
  modified_base (9)..(9): 2'-hydroxy corresponding base
  modified_base (10)..(10): 2'-hydroxy corresponding base
  modified_base (11)..(11): 2'-hydroxy corresponding base
  modified_base (12)..(12): 2'-hydroxy corresponding base
  modified_base (13)..(13): 2'-hydroxy corresponding base
  modified_base (14)..(14): 2'-hydroxy corresponding base
  modified_base (15)..(15): 2'-hydroxy corresponding base
  modified_base (16)..(16): 2'-hydroxy corresponding base
  modified_base (17)..(17): 2'-hydroxy corresponding base
  modified_base (18)..(18): 2'-hydroxy corresponding base
  modified_base (19)..(19): 2'-hydroxy corresponding base
  modified_base (20)..(20): deoxythymidine
  modified_base (21)..(21): deoxythymidine
ccucucgcagucagagcgctt

SEQ ID NO: 140 - DNA, 21 bp, Artificial Sequence
  Description of Artificial Sequence: Synthetic oligonucleotide
  Description of Combined DNA/RNA Molecule: Synthetic oligonucleotide
  siRNAs to PCSK9
  modified_base (1)..(1): 2'-hydroxy corresponding base
  modified_base (2)..(2): 2'-hydroxy corresponding base
  modified_base (3)..(3): 2'-hydroxy corresponding base
  modified_base (4)..(4): 2'-hydroxy corresponding base
  modified_base (5)..(5): 2'-hydroxy corresponding base
  modified_base (6)..(6): 2'-hydroxy corresponding base
  modified_base (7)..(7): 2'-hydroxy corresponding base
  modified_base (8)..(8): 2'-hydroxy corresponding base
  modified_base (9)..(9): 2'-hydroxy corresponding base
  modified_base (10)..(10): 2'-hydroxy corresponding base
  modified_base (11)..(11): 2'-hydroxy corresponding base
  modified_base (12)..(12): 2'-hydroxy corresponding base
  modified_base (13)..(13): 2'-hydroxy corresponding base
  modified_base (14)..(14): 2'-hydroxy corresponding base
  modified_base (15)..(15): 2'-hydroxy corresponding base
  modified_base (16)..(16): 2'-hydroxy corresponding base
  modified_base (17)..(17): 2'-hydroxy corresponding base
  modified_base (18)..(18): 2'-hydroxy corresponding base
  modified_base (19)..(19): 2'-hydroxy corresponding base
  modified_base (20)..(20): deoxythymidine
  modified_base (21)..(21): deoxythymidine
gcgcucugacugcgagaggtt

SEQ ID NO: 141 - DNA, 21 bp, Artificial Sequence
  Description of Artificial Sequence: Synthetic oligonucleotide
  Description of Combined DNA/RNA Molecule: Synthetic oligonucleotide
  siRNAs to PCSK9
  modified_base (1)..(1): 2'-hydroxy corresponding base
  modified_base (2)..(2): 2'-hydroxy corresponding base
  modified_base (3)..(3): 2'-hydroxy corresponding base
  modified_base (4)..(4): 2'-hydroxy corresponding base
  modified_base (5)..(5): 2'-hydroxy corresponding base
  modified_base (6)..(6): 2'-hydroxy corresponding base
  modified_base (7)..(7): 2'-hydroxy corresponding base
  modified_base (8)..(8): 2'-hydroxy corresponding base
  modified_base (9)..(9): 2'-hydroxy corresponding base
  modified_base (10)..(10): 2'-hydroxy corresponding base
  modified_base (11)..(11): 2'-hydroxy corresponding base
  modified_base (12)..(12): 2'-hydroxy corresponding base
  modified_base (13)..(13): 2'-hydroxy corresponding base
  modified_base (14)..(14): 2'-hydroxy corresponding base
  modified_base (15)..(15): 2'-hydroxy corresponding base
  modified_base (16)..(16): 2'-hydroxy corresponding base
  modified_base (17)..(17): 2'-hydroxy corresponding base
  modified_base (18)..(18): 2'-hydroxy corresponding base
  modified_base (19)..(19): 2'-hydroxy corresponding base
  modified_base (20)..(20): deoxythymidine
  modified_base (21)..(21): deoxythymidine
cucucgcagucagagcgcatt

SEQ ID NO: 142 - DNA, 21 bp, Artificial Sequence
  Description of Artificial Sequence: Synthetic oligonucleotide
  Description of Combined DNA/RNA Molecule: Synthetic oligonucleotide
  siRNAs to PCSK9
  modified_base (1)..(1): 2'-hydroxy corresponding base
  modified_base (2)..(2): 2'-hydroxy corresponding base
  modified_base (3)..(3): 2'-hydroxy corresponding base
  modified_base (4)..(4): 2'-hydroxy corresponding base
  modified_base (5)..(5): 2'-hydroxy corresponding base
  modified_base (6)..(6): 2'-hydroxy corresponding base
  modified_base (7)..(7): 2'-hydroxy corresponding base
  modified_base (8)..(8): 2'-hydroxy corresponding base
  modified_base (9)..(9): 2'-hydroxy corresponding base
  modified_base (10)..(10): 2'-hydroxy corresponding base
  modified_base (11)..(11): 2'-hydroxy corresponding base
  modified_base (12)..(12): 2'-hydroxy corresponding base
  modified_base (13)..(13): 2'-hydroxy corresponding base
  modified_base (14)..(14): 2'-hydroxy corresponding base
  modified_base (15)..(15): 2'-hydroxy corresponding base
  modified_base (16)..(16): 2'-hydroxy corresponding base
  modified_base (17)..(17): 2'-hydroxy corresponding base
  modified_base (18)..(18): 2'-hydroxy corresponding base
  modified_base (19)..(19): 2'-hydroxy corresponding base
  modified_base (20)..(20): deoxythymidine
  modified_base (21)..(21): deoxythymidine
ugcgcucugacugcgagagtt

SEQ ID NO: 143 - DNA, 21 bp, Artificial Sequence
  Description of Artificial Sequence: Synthetic oligonucleotide
  Description of Combined DNA/RNA Molecule: Synthetic oligonucleotide
  siRNAs to PCSK9
  modified_base (1)..(1): 2'-hydroxy corresponding base
  modified_base (2)..(2): 2'-hydroxy corresponding base
  modified_base (3)..(3): 2'-hydroxy corresponding base
  modified_base (4)..(4): 2'-hydroxy corresponding base
  modified_base (5)..(5): 2'-hydroxy corresponding base
  modified_base (6)..(6): 2'-hydroxy corresponding base
  modified_base (7)..(7): 2'-hydroxy corresponding base
  modified_base (8)..(8): 2'-hydroxy corresponding base
  modified_base (9)..(9): 2'-hydroxy corresponding base
  modified_base (10)..(10): 2'-hydroxy corresponding base
  modified_base (11)..(11): 2'-hydroxy corresponding base
  modified_base (12)..(12): 2'-hydroxy corresponding base
  modified_base (13)..(13): 2'-hydroxy corresponding base
  modified_base (14)..(14): 2'-hydroxy corresponding base
  modified_base (15)..(15): 2'-hydroxy corresponding base
  modified_base (16)..(16): 2'-hydroxy corresponding base
  modified_base (17)..(17): 2'-hydroxy corresponding base
  modified_base (18)..(18): 2'-hydroxy corresponding base
  modified_base (19)..(19): 2'-hydroxy corresponding base
  modified_base (20)..(20): deoxythymidine
  modified_base (21)..(21): deoxythymidine
ucucgcagucagagcgcactt

SEQ ID NO: 144 - DNA, 21 bp, Artificial Sequence
  Description of Artificial Sequence: Synthetic oligonucleotide
  Description of Combined DNA/RNA Molecule: Synthetic oligonucleotide
  siRNAs to PCSK9
  modified_base (1)..(1): 2'-hydroxy corresponding base
  modified_base (2)..(2): 2'-hydroxy corresponding base
  modified_base (3)..(3): 2'-hydroxy corresponding base
  modified_base (4)..(4): 2'-hydroxy corresponding base
  modified_base (5)..(5): 2'-hydroxy corresponding base
  modified_base (6)..(6): 2'-hydroxy corresponding base
  modified_base (7)..(7): 2'-hydroxy corresponding base
  modified_base (8)..(8): 2'-hydroxy corresponding base
  modified_base (9)..(9): 2'-hydroxy corresponding base
  modified_base (10)..(10): 2'-hydroxy corresponding base
  modified_base (11)..(11): 2'-hydroxy corresponding base
  modified_base (12)..(12): 2'-hydroxy corresponding base
  modified_base (13)..(13): 2'-hydroxy corresponding base
  modified_base (14)..(14): 2'-hydroxy corresponding base
  modified_base (15)..(15): 2'-hydroxy corresponding base
  modified_base (16)..(16): 2'-hydroxy corresponding base
  modified_base (17)..(17): 2'-hydroxy corresponding base
  modified_base (18)..(18): 2'-hydroxy corresponding base
  modified_base (19)..(19): 2'-hydroxy corresponding base
  modified_base (20)..(20): deoxythymidine
  modified_base (21)..(21): deoxythymidine
gugcgcucugacugcgagatt

SEQ ID NO: 145 - DNA, 21 bp, Artificial Sequence
  Description of Artificial Sequence: Synthetic oligonucleotide
  Description of Combined DNA/RNA Molecule: Synthetic oligonucleotide
  siRNAs to PCSK9
  modified_base (1)..(1): 2'-hydroxy corresponding base
  modified_base (2)..(2): 2'-hydroxy corresponding base
  modified_base (3)..(3): 2'-hydroxy corresponding base
  modified_base (4)..(4): 2'-hydroxy corresponding base
  modified_base (5)..(5): 2'-hydroxy corresponding base
  modified_base (6)..(6): 2'-hydroxy corresponding base
  modified_base (7)..(7): 2'-hydroxy corresponding base
  modified_base (8)..(8): 2'-hydroxy corresponding base
  modified_base (9)..(9): 2'-hydroxy corresponding base
  modified_base (10)..(10): 2'-hydroxy corresponding base
  modified_base (11)..(11): 2'-hydroxy corresponding base
  modified_base (12)..(12): 2'-hydroxy corresponding base
  modified_base (13)..(13): 2'-hydroxy corresponding base
  modified_base (14)..(14): 2'-hydroxy corresponding base
  modified_base (15)..(15): 2'-hydroxy corresponding base
  modified_base (16)..(16): 2'-hydroxy corresponding base
  modified_base (17)..(17): 2'-hydroxy corresponding base
  modified_base (18)..(18): 2'-hydroxy corresponding base
  modified_base (19)..(19): 2'-hydroxy corresponding base
  modified_base (20)..(20): deoxythymidine
  modified_base (21)..(21): 5'-thio thymidine
cucgcagucagagcgcacutt

SEQ ID NO: 146 - DNA, 21 bp, Artificial Sequence
  Description of Artificial Sequence: Synthetic oligonucleotide
  Description of Combined DNA/RNA Molecule: Synthetic oligonucleotide
  siRNAs to PCSK9
  modified_base (1)..(1): 2'-hydroxy corresponding base
  modified_base (2)..(2): 2'-hydroxy corresponding base
  modified_base (3)..(3): 2'-hydroxy corresponding base
  modified_base (4)..(4): 2'-hydroxy corresponding base
  modified_base (5)..(5): 2'-hydroxy corresponding base
  modified_base (6)..(6): 2'-hydroxy corresponding base
  modified_base (7)..(7): 2'-hydroxy corresponding base
  modified_base (8)..(8): 2'-hydroxy corresponding base
  modified_base (9)..(9): 2'-hydroxy corresponding base
  modified_base (10)..(10): 2'-hydroxy corresponding base
  modified_base (11)..(11): 2'-hydroxy corresponding base
  modified_base (12)..(12): 2'-hydroxy corresponding base
  modified_base (13)..(13): 2'-hydroxy corresponding base
  modified_base (14)..(14): 2'-hydroxy corresponding base
  modified_base (15)..(15): 2'-hydroxy corresponding base
  modified_base (16)..(16): 2'-hydroxy corresponding base
  modified_base (17)..(17): 2'-hydroxy corresponding base
  modified_base (18)..(18): 2'-hydroxy corresponding base
  modified_base (19)..(19): 2'-hydroxy corresponding base
  modified_base (20)..(20): deoxythymidine
  modified_base (21)..(21): 5'-thio thymidine
agugcgcucugacugcgagtt

SEQ ID NO: 147 - DNA, 21 bp, Artificial Sequence
  Description of Artificial Sequence: Synthetic oligonucleotide
  Description of Combined DNA/RNA Molecule: Synthetic oligonucleotide
  siRNAs to PCSK9
  modified_base (1)..(1): 2'-O-methyl corresponding base
  modified_base (2)..(2): 2'-O-methyl corresponding base
  modified_base (3)..(3): 2'-O-methyl corresponding base
  modified_base (4)..(4): 2'-hydroxy corresponding base
  modified_base (5)..(5): 2'-O-methyl corresponding base
  modified_base (6)..(6): 2'-hydroxy corresponding base
  modified_base (7)..(7): 2'-hydroxy corresponding base
  modified_base (8)..(8): 2'-O-methyl corresponding base
  modified_base (9)..(9): 2'-O-methyl corresponding base
  modified_base (10)..(10): 2'-hydroxy corresponding base
  modified_base (11)..(11): 2'-hydroxy corresponding base
  modified_base (12)..(12): 2'-hydroxy corresponding base
  modified_base (13)..(13): 2'-hydroxy corresponding base
  modified_base (14)..(14): 2'-O-methyl corresponding base
  modified_base (15)..(15): 2'-hydroxy corresponding base
  modified_base (16)..(16): 2'-O-methyl corresponding base
  modified_base (17)..(17): 2'-hydroxy corresponding base
  modified_base (18)..(18): 2'-O-methyl corresponding base
  modified_base (19)..(19): 2'-O-methyl corresponding base
  modified_base (20)..(20): deoxythymidine
  modified_base (21)..(21): 5'-thio thymidine
cucgcagucagagcgcacutt

SEQ ID NO: 148 - DNA, 21 bp, Artificial Sequence
  Description of Artificial Sequence: Synthetic oligonucleotide
  Description of Combined DNA/RNA Molecule: Synthetic oligonucleotide
  siRNAs to PCSK9
  modified_base (1)..(1): 2'-hydroxy corresponding base
  modified_base (2)..(2): 2'-hydroxy corresponding base
  modified_base (3)..(3): 2'-hydroxy corresponding base
  modified_base (4)..(4): 2'-hydroxy corresponding base
  modified_base (5)..(5): 2'-hydroxy corresponding base
  modified_base (6)..(6): 2'-hydroxy corresponding base
  modified_base (7)..(7): 2'-hydroxy corresponding base
  modified_base (8)..(8): 2'-hydroxy corresponding base
  modified_base (9)..(9): 2'-hydroxy corresponding base
  modified_base (10)..(10): 2'-hydroxy corresponding base
  modified_base (11)..(11): 2'-hydroxy corresponding base
  modified_base (12)..(12): 2'-hydroxy corresponding base
  modified_base (13)..(13): 2'-hydroxy corresponding base
  modified_base (14)..(14): 2'-hydroxy corresponding base
  modified_base (15)..(15): 2'-hydroxy corresponding base
  modified_base (16)..(16): 2'-hydroxy corresponding base
  modified_base (17)..(17): 2'-hydroxy corresponding base
  modified_base (18)..(18): 2'-hydroxy corresponding base
  modified_base (19)..(19): 2'-hydroxy corresponding base
  modified_base (20)..(20): deoxythymidine
  modified_base (21)..(21): 5'-thio thymidine
agugcgcucugacugcgagtt

SEQ ID NO: 149 - DNA, 21 bp, Artificial Sequence
  Description of Artificial Sequence: Synthetic oligonucleotide
  Description of Combined DNA/RNA Molecule: Synthetic oligonucleotide
  siRNAs to PCSK9
  modified_base (1)..(1): 2'-hydroxy corresponding base
  modified_base (2)..(2): 2'-hydroxy corresponding base
  modified_base (3)..(3): 2'-hydroxy corresponding base
  modified_base (4)..(4): 2'-hydroxy corresponding base
  modified_base (5)..(5): 2'-hydroxy corresponding base
  modified_base (6)..(6): 2'-hydroxy corresponding base
  modified_base (7)..(7): 2'-hydroxy corresponding base
  modified_base (8)..(8): 2'-hydroxy corresponding base
  modified_base (9)..(9): 2'-hydroxy corresponding base
  modified_base (10)..(10): 2'-hydroxy corresponding base
  modified_base (11)..(11): 2'-hydroxy corresponding base
  modified_base (12)..(12): 2'-hydroxy corresponding base
  modified_base (13)..(13): 2'-hydroxy corresponding base
  modified_base (14)..(14): 2'-hydroxy corresponding base
  modified_base (15)..(15): 2'-hydroxy corresponding base
  modified_base (16)..(16): 2'-hydroxy corresponding base
  modified_base (17)..(17): 2'-hydroxy corresponding base
  modified_base (18)..(18): 2'-hydroxy corresponding base
  modified_base (19)..(19): 2'-hydroxy corresponding base
  modified_base (20)..(20): deoxythymidine
  modified_base (21)..(21): 5'-thio thymidine
gcagucagagcgcacugcctt

SEQ ID NO: 150 - DNA, 21 bp, Artificial Sequence
  Description of Artificial Sequence: Synthetic oligonucleotide
  Description of Combined DNA/RNA Molecule: Synthetic oligonucleotide
  siRNAs to PCSK9
  modified_base (1)..(1): 2'-hydroxy corresponding base
  modified_base (2)..(2): 2'-hydroxy corresponding base
  modified_base (3)..(3): 2'-hydroxy corresponding base
  modified_base (4)..(4): 2'-hydroxy corresponding base
  modified_base (5)..(5): 2'-hydroxy corresponding base
  modified_base (6)..(6): 2'-hydroxy corresponding base
  modified_base (7)..(7): 2'-hydroxy corresponding base
  modified_base (8)..(8): 2'-hydroxy corresponding base
  modified_base (9)..(9): 2'-hydroxy corresponding base
  modified_base (10)..(10): 2'-hydroxy corresponding base
  modified_base (11)..(11): 2'-hydroxy corresponding base
  modified_base (12)..(12): 2'-hydroxy corresponding base
  modified_base (13)..(13): 2'-hydroxy corresponding base
  modified_base (14)..(14): 2'-hydroxy corresponding base
  modified_base (15)..(15): 2'-hydroxy corresponding base
  modified_base (16)..(16): 2'-hydroxy corresponding base
  modified_base (17)..(17): 2'-hydroxy corresponding base
  modified_base (18)..(18): 2'-hydroxy corresponding base
  modified_base (19)..(19): 2'-hydroxy corresponding base
  modified_base (20)..(20): deoxythymidine
  modified_base (21)..(21): 5'-thio thymidine
ggcagugcgcucugacugctt

SEQ ID NO: 151 - DNA, 21 bp, Artificial Sequence
  Description of Artificial Sequence: Synthetic oligonucleotide
  Description of Combined DNA/RNA Molecule: Synthetic oligonucleotide
  siRNAs to PCSK9
  modified_base (1)..(1): 2'-hydroxy corresponding base
  modified_base (2)..(2): 2'-O-methyl corresponding base
  modified_base (3)..(3): 2'-hydroxy corresponding base
  modified_base (4)..(4): 2'-hydroxy corresponding base
  modified_base (5)..(5): 2'-O-methyl corresponding base
  modified_base (6)..(6): 2'-O-methyl corresponding base
  modified_base (7)..(7): 2'-hydroxy corresponding base
  modified_base (8)..(8): 2'-hydroxy corresponding base
  modified_base (9)..(9): 2'-hydroxy corresponding base
  modified_base (10)..(10): 2'-hydroxy corresponding base
  modified_base (11)..(11): 2'-O-methyl corresponding base
  modified_base (12)..(12): 2'-hydroxy corresponding base
  modified_base (13)..(13): 2'-O-methyl corresponding base
  modified_base (14)..(14): 2'-hydroxy corresponding base
  modified_base (15)..(15): 2'-O-methyl corresponding base
  modified_base (16)..(16): 2'-O-methyl corresponding base
  modified_base (17)..(17): 2'-hydroxy corresponding base
  modified_base (18)..(18): 2'-O-methyl corresponding base
  modified_base (19)..(19): 2'-O-methyl corresponding base
  modified_base (20)..(20): deoxythymidine
  modified_base (21)..(21): 5'-thio thymidine
gcagucagagcgcacugcctt

SEQ ID NO: 152 - DNA, 21 bp, Artificial Sequence
  Description of Artificial Sequence: Synthetic oligonucleotide
  Description of Combined DNA/RNA Molecule: Synthetic oligonucleotide
  siRNAs to PCSK9
  modified_base (1)..(1): 2'-hydroxy corresponding base
  modified_base (2)..(2): 2'-hydroxy corresponding base
  modified_base (3)..(3): 2'-O-methyl corresponding base
  modified_base (4)..(4): 2'-hydroxy corresponding base
  modified_base (5)..(5): 2'-hydroxy corresponding base
  modified_base (6)..(6): 2'-hydroxy corresponding base
  modified_base (7)..(7): 2'-hydroxy corresponding base
  modified_base (8)..(8): 2'-hydroxy corresponding base
  modified_base (9)..(9): 2'-hydroxy corresponding base
  modified_base (10)..(10): 2'-hydroxy corresponding base
  modified_base (11)..(11): 2'-hydroxy corresponding base
  modified_base (12)..(12): 2'-hydroxy corresponding base
  modified_base (13)..(13): 2'-hydroxy corresponding base
  modified_base (14)..(14): 2'-hydroxy corresponding base
  modified_base (15)..(15): 2'-hydroxy corresponding base
  modified_base (16)..(16): 2'-hydroxy corresponding base
  modified_base (17)..(17): 2'-hydroxy corresponding base
  modified_base (18)..(18): 2'-hydroxy corresponding base
  modified_base (19)..(19): 2'-hydroxy corresponding base
  modified_base (20)..(20): deoxythymidine
  modified_base (21)..(21): 5'-thio thymidine
ggcagugcgcucugacugctt

SEQ ID NO: 153 - DNA, 21 bp, Artificial Sequence
  Description of Artificial Sequence: Synthetic oligonucleotide
  Description of Combined DNA/RNA Molecule: Synthetic oligonucleotide
  siRNAs to PCSK9
  modified_base (1)..(1): 2'-hydroxy corresponding base
  modified_base (2)..(2): 2'-hydroxy corresponding base
  modified_base (3)..(3): 2'-hydroxy corresponding base
  modified_base (4)..(4): 2'-hydroxy corresponding base
  modified_base (5)..(5): 2'-hydroxy corresponding base
  modified_base (6)..(6): 2'-hydroxy corresponding base
  modified_base (7)..(7): 2'-hydroxy corresponding base
  modified_base (8)..(8): 2'-hydroxy corresponding base
  modified_base (9)..(9): 2'-hydroxy corresponding base
  modified_base (10)..(10): 2'-hydroxy corresponding base
  modified_base (11)..(11): 2'-hydroxy corresponding base
  modified_base (12)..(12): 2'-hydroxy corresponding base
  modified_base (13)..(13): 2'-hydroxy corresponding base
  modified_base (14)..(14): 2'-hydroxy corresponding base
  modified_base (15)..(15): 2'-hydroxy corresponding base
  modified_base (16)..(16): 2'-hydroxy corresponding base
  modified_base (17)..(17): 2'-hydroxy corresponding base
  modified_base (18)..(18): 2'-hydroxy corresponding base
  modified_base (19)..(19): 2'-hydroxy corresponding base
  modified_base (20)..(20): deoxythymidine
  modified_base (21)..(21): 5'-thio thymidine
gggauaccucaccaagauctt

SEQ ID NO: 154 - DNA, 21 bp, Artificial Sequence
  Description of Artificial Sequence: Synthetic oligonucleotide
  Description of Combined DNA/RNA Molecule: Synthetic oligonucleotide
  siRNAs to PCSK9
  modified_base (1)..(1): 2'-hydroxy corresponding base
  modified_base (2)..(2): 2'-hydroxy corresponding base
  modified_base (3)..(3): 2'-hydroxy corresponding base
  modified_base (4)..(4): 2'-hydroxy corresponding base
  modified_base (5)..(5): 2'-hydroxy corresponding base
  modified_base (6)..(6): 2'-hydroxy corresponding base
  modified_base (7)..(7): 2'-hydroxy corresponding base
  modified_base (8)..(8): 2'-hydroxy corresponding base
  modified_base (9)..(9): 2'-hydroxy corresponding base
  modified_base (10)..(10): 2'-hydroxy corresponding base
  modified_base (11)..(11): 2'-hydroxy corresponding base
  modified_base (12)..(12): 2'-hydroxy corresponding base
  modified_base (13)..(13): 2'-hydroxy corresponding base
  modified_base (14)..(14): 2'-hydroxy corresponding base
  modified_base (15)..(15): 2'-hydroxy corresponding base
  modified_base (16)..(16): 2'-hydroxy corresponding base
  modified_base (17)..(17): 2'-hydroxy corresponding base
  modified_base (18)..(18): 2'-hydroxy corresponding base
  modified_base (19)..(19): 2'-hydroxy corresponding base
  modified_base (20)..(20): deoxythymidine
  modified_base (21)..(21): 5'-thio thymidine
gaucuuggugagguauccctt

SEQ ID NO: 155 - DNA, 21 bp, Artificial Sequence
  Description of Artificial Sequence: Synthetic oligonucleotide
  Description of Combined DNA/RNA Molecule: Synthetic oligonucleotide
  siRNAs to PCSK9
  modified_base (1)..(1): 2'-hydroxy corresponding base
  modified_base (2)..(2): 2'-hydroxy corresponding base
  modified_base (3)..(3): 2'-hydroxy corresponding base
  modified_base (4)..(4): 2'-hydroxy corresponding base
  modified_base (5)..(5): 2'-O-methyl corresponding base
  modified_base (6)..(6): 2'-hydroxy corresponding base
  modified_base (7)..(7): 2'-O-methyl corresponding base
  modified_base (8)..(8): 2'-O-methyl corresponding base
  modified_base (9)..(9): 2'-O-methyl corresponding base
  modified_base (10)..(10): 2'-O-methyl corresponding base
  modified_base (11)..(11): 2'-hydroxy corresponding base
  modified_base (12)..(12): 2'-O-methyl corresponding base
  modified_base (13)..(13): 2'-O-methyl corresponding base
  modified_base (14)..(14): 2'-hydroxy corresponding base
  modified_base (15)..(15): 2'-hydroxy corresponding base
  modified_base (16)..(16): 2'-hydroxy corresponding base
  modified_base (17)..(17): 2'-hydroxy corresponding base
  modified_base (18)..(18): 2'-O-methyl corresponding base
  modified_base (19)..(19): 2'-O-methyl corresponding base
  modified_base (20)..(20): deoxythymidine
  modified_base (21)..(21): 5'-thio thymidine
gggauaccucaccaagauctt

SEQ ID NO: 156 - DNA, 21 bp, Artificial Sequence
  Description of Artificial Sequence: Synthetic oligonucleotide
  Description of Combined DNA/RNA Molecule: Synthetic oligonucleotide
  siRNAs to PCSK9
  modified_base (1)..(1): 2'-hydroxy corresponding base
  modified_base (2)..(2): 2'-hydroxy corresponding base
  modified_base (3)..(3): 2'-hydroxy corresponding base
  modified_base (4)..(4): 2'-hydroxy corresponding base
  modified_base (5)..(5): 2'-hydroxy corresponding base
  modified_base (6)..(6): 2'-hydroxy corresponding base
  modified_base (7)..(7): 2'-hydroxy corresponding base
  modified_base (8)..(8): 2'-hydroxy corresponding base
  modified_base (9)..(9): 2'-hydroxy corresponding base
  modified_base (10)..(10): 2'-hydroxy corresponding base
  modified_base (11)..(11): 2'-hydroxy corresponding base
  modified_base (12)..(12): 2'-hydroxy corresponding base
  modified_base (13)..(13): 2'-hydroxy corresponding base
  modified_base (14)..(14): 2'-O-methyl corresponding base
  modified_base (15)..(15): 2'-hydroxy corresponding base
  modified_base (16)..(16): 2'-hydroxy corresponding base
  modified_base (17)..(17): 2'-hydroxy corresponding base
  modified_base (18)..(18): 2'-hydroxy corresponding base
  modified_base (19)..(19): 2'-hydroxy corresponding base
  modified_base (20)..(20): deoxythymidine
  modified_base (21)..(21): 5'-thio thymidine
gaucuuggugagguauccctt

SEQ ID NO: 157 - DNA, 21 bp, Artificial Sequence
  Description of Artificial Sequence: Synthetic oligonucleotide
  Description of Combined DNA/RNA Molecule: Synthetic oligonucleotide
  siRNAs to PCSK9
  modified_base (1)..(1): 2'-hydroxy corresponding base
  modified_base (2)..(2): 2'-hydroxy corresponding base
  modified_base (3)..(3): 2'-hydroxy corresponding base
  modified_base (4)..(4): 2'-hydroxy corresponding base
  modified_base (5)..(5): 2'-hydroxy corresponding base
  modified_base (6)..(6): 2'-hydroxy corresponding base
  modified_base (7)..(7): 2'-hydroxy corresponding base
  modified_base (8)..(8): 2'-hydroxy corresponding base
  modified_base (9)..(9): 2'-hydroxy corresponding base
  modified_base (10)..(10): 2'-hydroxy corresponding base
  modified_base (11)..(11): 2'-hydroxy corresponding base
  modified_base (12)..(12): 2'-hydroxy corresponding base
  modified_base (13)..(13): 2'-hydroxy corresponding base
  modified_base (14)..(14): 2'-hydroxy corresponding base
  modified_base (15)..(15): 2'-hydroxy corresponding base
  modified_base (16)..(16): 2'-hydroxy corresponding base
  modified_base (17)..(17): 2'-hydroxy corresponding base
  modified_base (18)..(18): 2'-hydroxy corresponding base
  modified_base (19)..(19): 2'-hydroxy corresponding base
  modified_base (20)..(20): deoxythymidine
  modified_base (21)..(21): 5'-thio thymidine
uggugaagaugaguggcgatt

SEQ ID NO: 158 - DNA, 21 bp, Artificial Sequence
  Description of Artificial Sequence: Synthetic oligonucleotide
  Description of Combined DNA/RNA Molecule: Synthetic oligonucleotide
  siRNAs to PCSK9
  modified_base (1)..(1): 2'-hydroxy corresponding base
  modified_base (2)..(2): 2'-hydroxy corresponding base
  modified_base (3)..(3): 2'-hydroxy corresponding base
  modified_base (4)..(4): 2'-hydroxy corresponding base
  modified_base (5)..(5): 2'-hydroxy corresponding base
  modified_base (6)..(6): 2'-hydroxy corresponding base
  modified_base (7)..(7): 2'-hydroxy corresponding base
  modified_base (8)..(8): 2'-hydroxy corresponding base
  modified_base (9)..(9): 2'-hydroxy corresponding base
  modified_base (10)..(10): 2'-hydroxy corresponding base
  modified_base (11)..(11): 2'-hydroxy corresponding base
  modified_base (12)..(12): 2'-hydroxy corresponding base
  modified_base (13)..(13): 2'-hydroxy corresponding base
  modified_base (14)..(14): 2'-hydroxy corresponding base
  modified_base (15)..(15): 2'-hydroxy corresponding base
  modified_base (16)..(16): 2'-hydroxy corresponding base
  modified_base (17)..(17): 2'-hydroxy corresponding base
  modified_base (18)..(18): 2'-hydroxy corresponding base
  modified_base (19)..(19): 2'-hydroxy corresponding base
  modified_base (20)..(20): deoxythymidine
  modified_base (21)..(21): 5'-thio thymidine
ucgccacucaucuucaccatt

SEQ ID NO: 159 - DNA, 21 bp, Artificial Sequence
  Description of Artificial Sequence: Synthetic oligonucleotide
  Description of Combined DNA/RNA Molecule: Synthetic oligonucleotide
  siRNAs to PCSK9
  modified_base (1)..(1): 2'-O-methyl corresponding base
  modified_base (2)..(2): 2'-hydroxy corresponding base
  modified_base (3)..(3): 2'-hydroxy corresponding base
  modified_base (4)..(4): 2'-O-methyl corresponding base
  modified_base (5)..(5): 2'-hydroxy corresponding base
  modified_base (6)..(6): 2'-hydroxy corresponding base
  modified_base (7)..(7): 2'-hydroxy corresponding base
  modified_base (8)..(8): 2'-hydroxy corresponding base
  modified_base (9)..(9): 2'-hydroxy corresponding base
  modified_base (10)..(10): 2'-O-methyl corresponding base
  modified_base (11)..(11): 2'-hydroxy corresponding base
  modified_base (12)..(12): 2'-hydroxy corresponding base
  modified_base (13)..(13): 2'-hydroxy corresponding base
  modified_base (14)..(14): 2'-O-methyl corresponding base
  modified_base (15)..(15): 2'-hydroxy corresponding base
  modified_base (16)..(16): 2'-hydroxy corresponding base
  modified_base (17)..(17): 2'-O-methyl corresponding base
  modified_base (18)..(18): 2'-hydroxy corresponding base
  modified_base (19)..(19): 2'-hydroxy corresponding base
  modified_base (20)..(20): deoxythymidine
  modified_base (21)..(21): 5'-thio thymidine
uggugaagaugaguggcgatt

SEQ ID NO: 160 - DNA, 21 bp, Artificial Sequence
  Description of Artificial Sequence: Synthetic oligonucleotide
  Description of Combined DNA/RNA Molecule: Synthetic oligonucleotide
  siRNAs to PCSK9
  modified_base (1)..(1): 2'-hydroxy corresponding base
  modified_base (2)..(2): 2'-hydroxy corresponding base
  modified_base (3)..(3): 2'-hydroxy corresponding base
  modified_base (4)..(4): 2'-hydroxy corresponding base
  modified_base (5)..(5): 2'-O-methyl corresponding base
  modified_base (6)..(6): 2'-hydroxy corresponding base
  modified_base (7)..(7): 2'-hydroxy corresponding base
  modified_base (8)..(8): 2'-hydroxy corresponding base
  modified_base (9)..(9): 2'-O-methyl corresponding base
  modified_base (10)..(10): 2'-hydroxy corresponding base
  modified_base (11)..(11): 2'-hydroxy corresponding base
  modified_base (12)..(12): 2'-hydroxy corresponding base
  modified_base (13)..(13): 2'-hydroxy corresponding base
  modified_base (14)..(14): 2'-hydroxy corresponding base
  modified_base (15)..(15): 2'-O-methyl corresponding base
  modified_base (16)..(16): 2'-hydroxy corresponding base
  modified_base (17)..(17): 2'-hydroxy corresponding base
  modified_base (18)..(18): 2'-O-methyl corresponding base
  modified_base (19)..(19): 2'-hydroxy corresponding base
  modified_base (20)..(20): deoxythymidine
  modified_base (21)..(21): 5'-thio thymidine
ucgccacucaucuucaccatt

SEQ ID NO: 161 - DNA, 21 bp, Artificial Sequence
  Description of Artificial Sequence: Synthetic oligonucleotide
  Description of Combined DNA/RNA Molecule: Synthetic oligonucleotide
  siRNAs to PCSK9
  modified_base (1)..(1): 2'-hydroxy corresponding base
  modified_base (2)..(2): 2'-hydroxy corresponding base
  modified_base (3)..(3): 2'-hydroxy corresponding base
  modified_base (4)..(4): 2'-hydroxy corresponding base
  modified_base (5)..(5): 2'-hydroxy corresponding base
  modified_base (6)..(6): 2'-hydroxy corresponding base
  modified_base (7)..(7): 2'-hydroxy corresponding base
  modified_base (8)..(8): 2'-hydroxy corresponding base
  modified_base (9)..(9): 2'-hydroxy corresponding base
  modified_base (10)..(10): 2'-hydroxy corresponding base
  modified_base (11)..(11): 2'-hydroxy corresponding base
  modified_base (12)..(12): 2'-hydroxy corresponding base
  modified_base (13)..(13): 2'-hydroxy corresponding base
  modified_base (14)..(14): 2'-hydroxy corresponding base
  modified_base (15)..(15): 2'-hydroxy corresponding base
  modified_base (16)..(16): 2'-hydroxy corresponding base
  modified_base (17)..(17): 2'-hydroxy corresponding base
  modified_base (18)..(18): 2'-hydroxy corresponding base
  modified_base (19)..(19): 2'-hydroxy corresponding base
  modified_base (20)..(20): deoxythymidine
  modified_base (21)..(21): 5'-thio thymidine
gaagaugaguggcgaccugtt

SEQ ID NO: 162 - DNA, 21 bp, Artificial Sequence
  Description of Artificial Sequence: Synthetic oligonucleotide
  Description of Combined DNA/RNA Molecule: Synthetic oligonucleotide
  siRNAs to PCSK9
  modified_base (1)..(1): 2'-hydroxy corresponding base
  modified_base (2)..(2): 2'-hydroxy corresponding base
  modified_base (3)..(3): 2'-hydroxy corresponding base
  modified_base (4)..(4): 2'-hydroxy corresponding base
  modified_base (5)..(5): 2'-hydroxy corresponding base
  modified_base (6)..(6): 2'-hydroxy corresponding base
  modified_base (7)..(7): 2'-hydroxy corresponding base
  modified_base (8)..(8): 2'-hydroxy corresponding base
  modified_base (9)..(9): 2'-hydroxy corresponding base
  modified_base (10)..(10): 2'-hydroxy corresponding base
  modified_base (11)..(11): 2'-hydroxy corresponding base
  modified_base (12)..(12): 2'-hydroxy corresponding base
  modified_base (13)..(13): 2'-hydroxy corresponding base
  modified_base (14)..(14): 2'-hydroxy corresponding base
  modified_base (15)..(15): 2'-hydroxy corresponding base
  modified_base (16)..(16): 2'-hydroxy corresponding base
  modified_base (17)..(17): 2'-hydroxy corresponding base
  modified_base (18)..(18): 2'-hydroxy corresponding base
  modified_base (19)..(19): 2'-hydroxy corresponding base
  modified_base (20)..(20): deoxythymidine
  modified_base (21)..(21): 5'-thio thymidine
caggucgccacucaucuuctt

SEQ ID NO: 163 - DNA, 21 bp, Artificial Sequence
  Description of Artificial Sequence: Synthetic oligonucleotide
  Description of Combined DNA/RNA Molecule: Synthetic oligonucleotide
  siRNAs to PCSK9
  modified_base (1)..(1): 2'-hydroxy corresponding base
  modified_base (2)..(2): 2'-hydroxy corresponding base
  modified_base (3)..(3): 2'-hydroxy corresponding base
  modified_base (4)..(4): 2'-hydroxy corresponding base
  modified_base (5)..(5): 2'-hydroxy corresponding base
  modified_base (6)..(6): 2'-O-methyl corresponding base
  modified_base (7)..(7): 2'-hydroxy corresponding base
  modified_base (8)..(8): 2'-hydroxy corresponding base
  modified_base (9)..(9): 2'-hydroxy corresponding base
  modified_base (10)..(10): 2'-O-methyl corresponding base
  modified_base (11)..(11): 2'-hydroxy corresponding base
  modified_base (12)..(12): 2'-hydroxy corresponding base
  modified_base (13)..(13): 2'-O-methyl corresponding base
  modified_base (14)..(14): 2'-hydroxy corresponding base
  modified_base (15)..(15): 2'-hydroxy corresponding base
  modified_base (16)..(16): 2'-O-methyl corresponding base
  modified_base (17)..(17): 2'-O-methyl corresponding base
  modified_base (18)..(18): 2'-O-methyl corresponding base
  modified_base (19)..(19): 2'-hydroxy corresponding base
  modified_base (20)..(20): deoxythymidine
  modified_base (21)..(21): 5'-thio thymidine
gaagaugaguggcgaccugtt

SEQ ID NO: 164 - DNA, 21 bp, Artificial Sequence
  Description of Artificial Sequence: Synthetic oligonucleotide
  Description of Combined DNA/RNA Molecule: Synthetic oligonucleotide
  siRNAs to PCSK9
  modified_base (1)..(1): 2'-O-methyl corresponding base
  modified_base (2)..(2): 2'-hydroxy corresponding base
  modified_base (3)..(3): 2'-hydroxy corresponding base
  modified_base (4)..(4): 2'-hydroxy corresponding base
  modified_base (5)..(5): 2'-hydroxy corresponding base
  modified_base (6)..(6): 2'-hydroxy corresponding base
  modified_base (7)..(7): 2'-hydroxy corresponding base
  modified_base (8)..(8): 2'-hydroxy corresponding base
  modified_base (9)..(9): 2'-O-methyl corresponding base
  modified_base (10)..(10): 2'-hydroxy corresponding base
  modified_base (11)..(11): 2'-hydroxy corresponding base
  modified_base (12)..(12): 2'-hydroxy corresponding base
  modified_base (13)..(13): 2'-O-methyl corresponding base
  modified_base (14)..(14): 2'-hydroxy corresponding base
  modified_base (15)..(15): 2'-hydroxy corresponding base
  modified_base (16)..(16): 2'-hydroxy corresponding base
  modified_base (17)..(17): 2'-hydroxy corresponding base
  modified_base (18)..(18): 2'-hydroxy corresponding base
  modified_base (19)..(19): 2'-hydroxy corresponding base
  modified_base (20)..(20): deoxythymidine
  modified_base (21)..(21): 5'-thio thymidine
caggucgccacucaucuuctt

SEQ ID NO: 165 - DNA, 21 bp, Artificial Sequence
  Description of Artificial Sequence: Synthetic oligonucleotide
  Description of Combined DNA/RNA Molecule: Synthetic oligonucleotide
  siRNAs to PCSK9
  modified_base (1)..(1): 2'-hydroxy corresponding base
  modified_base (2)..(2): 2'-hydroxy corresponding base
  modified_base (3)..(3): 2'-hydroxy corresponding base
  modified_base (4)..(4): 2'-hydroxy corresponding base
  modified_base (5)..(5): 2'-hydroxy corresponding base
  modified_base (6)..(6): 2'-hydroxy corresponding base
  modified_base (7)..(7): 2'-hydroxy corresponding base
  modified_base (8)..(8): 2'-hydroxy corresponding base
  modified_base (9)..(9): 2'-hydroxy corresponding base
  modified_base (10)..(10): 2'-hydroxy corresponding base
  modified_base (11)..(11): 2'-hydroxy corresponding base
  modified_base (12)..(12): 2'-hydroxy corresponding base
  modified_base (13)..(13): 2'-hydroxy corresponding base
  modified_base (14)..(14): 2'-hydroxy corresponding base
  modified_base (15)..(15): 2'-hydroxy corresponding base
  modified_base (16)..(16): 2'-hydroxy corresponding base
  modified_base (17)..(17): 2'-hydroxy corresponding base
  modified_base (18)..(18): 2'-hydroxy corresponding base
  modified_base (19)..(19): 2'-hydroxy corresponding base
  modified_base (20)..(20): deoxythymidine
  modified_base (21)..(21): 5'-thio thymidine
cccaugucgacuacaucgatt

SEQ ID NO: 166 - DNA, 21 bp, Artificial Sequence
  Description of Artificial Sequence: Synthetic oligonucleotide
  Description of Combined DNA/RNA Molecule: Synthetic oligonucleotide
  siRNAs to PCSK9
  modified_base (1)..(1): 2'-hydroxy corresponding base
  modified_base (2)..(2): 2'-hydroxy corresponding base
  modified_base (3)..(3): 2'-hydroxy corresponding base
  modified_base (4)..(4): 2'-hydroxy corresponding base
  modified_base (5)..(5): 2'-hydroxy corresponding base
  modified_base (6)..(6): 2'-hydroxy corresponding base
  modified_base (7)..(7): 2'-hydroxy corresponding base
  modified_base (8)..(8): 2'-hydroxy corresponding base
  modified_base (9)..(9): 2'-hydroxy corresponding base
  modified_base (10)..(10): 2'-hydroxy corresponding base
  modified_base (11)..(11): 2'-hydroxy corresponding base
  modified_base (12)..(12): 2'-hydroxy corresponding base
  modified_base (13)..(13): 2'-hydroxy corresponding base
  modified_base (14)..(14): 2'-hydroxy corresponding base
  modified_base (15)..(15): 2'-hydroxy corresponding base
  modified_base (16)..(16): 2'-hydroxy corresponding base
  modified_base (17)..(17): 2'-hydroxy corresponding base
  modified_base (18)..(18): 2'-hydroxy corresponding base
  modified_base (19)..(19): 2'-hydroxy corresponding base
  modified_base (20)..(20): deoxythymidine
  modified_base (21)..(21): 5'-thio thymidine
ucgauguagucgacaugggtt

SEQ ID NO: 167 - DNA, 21 bp, Artificial Sequence
  Description of Artificial Sequence: Synthetic oligonucleotide
  Description of Combined DNA/RNA Molecule: Synthetic oligonucleotide
  siRNAs to PCSK9
  modified_base (1)..(1): 2'-O-methyl corresponding base
  modified_base (2)..(2): 2'-O-methyl corresponding base
  modified_base (3)..(3): 2'-O-methyl corresponding base
  modified_base (4)..(4): 2'-hydroxy corresponding base
  modified_base (5)..(5): 2'-O-methyl corresponding base
  modified_base (6)..(6): 2'-hydroxy corresponding base
  modified_base (7)..(7): 2'-O-methyl corresponding base
  modified_base (8)..(8): 2'-O-methyl corresponding base
  modified_base (9)..(9): 2'-hydroxy corresponding base
  modified_base (10)..(10): 2'-hydroxy corresponding base
  modified_base (11)..(11): 2'-O-methyl corresponding base
  modified_base (12)..(12): 2'-O-methyl corresponding base
  modified_base (13)..(13): 2'-hydroxy corresponding base
  modified_base (14)..(14): 2'-O-methyl corresponding base
  modified_base (15)..(15): 2'-hydroxy corresponding base
  modified_base (16)..(16): 2'-O-methyl corresponding base
  modified_base (17)..(17): 2'-O-methyl corresponding base
  modified_base (18)..(18): 2'-hydroxy corresponding base
  modified_base (19)..(19): 2'-hydroxy corresponding base
  modified_base (20)..(20): deoxythymidine
  modified_base (21)..(21): 5'-thio thymidine
cccaugucgacuacaucgatt

SEQ ID NO: 168 - DNA, 21 bp, Artificial Sequence
  Description of Artificial Sequence: Synthetic oligonucleotide
  Description of Combined DNA/RNA Molecule: Synthetic oligonucleotide
  siRNAs to PCSK9
  modified_base (1)..(1): 2'-hydroxy corresponding base
  modified_base (2)..(2): 2'-hydroxy corresponding base
  modified_base (3)..(3): 2'-hydroxy corresponding base
  modified_base (4)..(4): 2'-hydroxy corresponding base
  modified_base (5)..(5): 2'-hydroxy corresponding base
  modified_base (6)..(6): 2'-hydroxy corresponding base
  modified_base (7)..(7): 2'-O-methyl corresponding base
  modified_base (8)..(8): 2'-hydroxy corresponding base
  modified_base (9)..(9): 2'-hydroxy corresponding base
  modified_base (10)..(10): 2'-hydroxy corresponding base
  modified_base (11)..(11): 2'-hydroxy corresponding base
  modified_base (12)..(12): 2'-hydroxy corresponding base
  modified_base (13)..(13): 2'-hydroxy corresponding base
  modified_base (14)..(14): 2'-O-methyl corresponding base
  modified_base (15)..(15): 2'-hydroxy corresponding base
  modified_base (16)..(16): 2'-hydroxy corresponding base
  modified_base (17)..(17): 2'-hydroxy corresponding base
  modified_base (18)..(18): 2'-hydroxy corresponding base
  modified_base (19)..(19): 2'-hydroxy corresponding base
  modified_base (20)..(20): deoxythymidine
  modified_base (21)..(21): 5'-thio thymidine
ucgauguagucgacaugggtt

SEQ ID NO: 169 - DNA, 21 bp, Artificial Sequence
  Description of Artificial Sequence: Synthetic oligonucleotide
  Description of Combined DNA/RNA Molecule: Synthetic oligonucleotide
  siRNAs to PCSK9
  modified_base (1)..(1): 2'-hydroxy corresponding base
  modified_base (2)..(2): 2'-hydroxy corresponding base
  modified_base (3)..(3): 2'-hydroxy corresponding base
  modified_base (4)..(4): 2'-hydroxy corresponding base
  modified_base (5)..(5): 2'-hydroxy corresponding base
  modified_base (6)..(6): 2'-hydroxy corresponding base
  modified_base (7)..(7): 2'-hydroxy corresponding base
  modified_base (8)..(8): 2'-hydroxy corresponding base
  modified_base (9)..(9): 2'-hydroxy corresponding base
  modified_base (10)..(10): 2'-hydroxy corresponding base
  modified_base (11)..(11): 2'-hydroxy corresponding base
  modified_base (12)..(12): 2'-hydroxy corresponding base
  modified_base (13)..(13): 2'-hydroxy corresponding base
  modified_base (14)..(14): 2'-hydroxy corresponding base
  modified_base (15)..(15): 2'-hydroxy corresponding base
  modified_base (16)..(16): 2'-hydroxy corresponding base
  modified_base (17)..(17): 2'-hydroxy corresponding base
  modified_base (18)..(18): 2'-hydroxy corresponding base
  modified_base (19)..(19): 2'-hydroxy corresponding base
  modified_base (20)..(20): deoxythymidine
  modified_base (21)..(21): 5'-thio thymidine
aucgaggaggacuccucugtt

SEQ ID NO: 170 - DNA, 21 bp, Artificial Sequence
  Description of Artificial Sequence: Synthetic oligonucleotide
  Description of Combined DNA/RNA Molecule: Synthetic oligonucleotide
  siRNAs to PCSK9
  modified_base (1)..(1): 2'-hydroxy corresponding base
  modified_base (2)..(2): 2'-hydroxy corresponding base
  modified_base (3)..(3): 2'-hydroxy corresponding base
  modified_base (4)..(4): 2'-hydroxy corresponding base
  modified_base (5)..(5): 2'-hydroxy corresponding base
  modified_base (6)..(6): 2'-hydroxy corresponding base
  modified_base (7)..(7): 2'-hydroxy corresponding base
  modified_base (8)..(8): 2'-hydroxy corresponding base
  modified_base (9)..(9): 2'-hydroxy corresponding base
  modified_base (10)..(10): 2'-hydroxy corresponding base
  modified_base (11)..(11): 2'-hydroxy corresponding base
  modified_base (12)..(12): 2'-hydroxy corresponding base
  modified_base (13)..(13): 2'-hydroxy corresponding base
  modified_base (14)..(14): 2'-hydroxy corresponding base
  modified_base (15)..(15): 2'-hydroxy corresponding base
  modified_base (16)..(16): 2'-hydroxy corresponding base
  modified_base (17)..(17): 2'-hydroxy corresponding base
  modified_base (18)..(18): 2'-hydroxy corresponding base
  modified_base (19)..(19): 2'-hydroxy corresponding base
  modified_base (20)..(20): deoxythymidine
  modified_base (21)..(21): 5'-thio thymidine
cagaggaguccuccucgautt

SEQ ID NO: 171 - DNA, 21 bp, Artificial Sequence
  Description of Artificial Sequence: Synthetic oligonucleotide
  Description of Combined DNA/RNA Molecule: Synthetic oligonucleotide
  siRNAs to PCSK9
  modified_base (1)..(1): 2'-hydroxy corresponding base
  modified_base (2)..(2): 2'-O-methyl corresponding base
  modified_base (3)..(3): 2'-O-methyl corresponding base
  modified_base (4)..(4): 2'-hydroxy corresponding base
  modified_base (5)..(5): 2'-hydroxy corresponding base
  modified_base (6)..(6): 2'-hydroxy corresponding base
  modified_base (7)..(7): 2'-hydroxy corresponding base
  modified_base (8)..(8): 2'-hydroxy corresponding base
  modified_base (9)..(9): 2'-hydroxy corresponding base
  modified_base (10)..(10): 2'-hydroxy corresponding base
  modified_base (11)..(11): 2'-hydroxy corresponding base
  modified_base (12)..(12): 2'-O-methyl corresponding base
  modified_base (13)..(13): 2'-O-methyl corresponding base
  modified_base (14)..(14): 2'-O-methyl corresponding base
  modified_base (15)..(15): 2'-O-methyl corresponding base
  modified_base (16)..(16): 2'-O-methyl corresponding base
  modified_base (17)..(17): 2'-O-methyl corresponding base
  modified_base (18)..(18): 2'-O-methyl corresponding base
  modified_base (19)..(19): 2'-hydroxy corresponding base
  modified_base (20)..(20): deoxythymidine
  modified_base (21)..(21): 5'-thio thymidine
aucgaggaggacuccucugtt

SEQ ID NO: 172 - DNA, 21 bp, Artificial Sequence
  Description of Artificial Sequence: Synthetic oligonucleotide
  Description of Combined DNA/RNA Molecule: Synthetic oligonucleotide
  siRNAs to PCSK9
  modified_base (1)..(1): 2'-O-methyl corresponding base
  modified_base (2)..(2): 2'-hydroxy corresponding base
  modified_base (3)..(3): 2'-hydroxy corresponding base
  modified_base (4)..(4): 2'-hydroxy corresponding base
  modified_base (5)..(5): 2'-hydroxy corresponding base
  modified_base (6)..(6): 2'-hydroxy corresponding base
  modified_base (7)..(7): 2'-hydroxy corresponding base
  modified_base (8)..(8): 2'-hydroxy corresponding base
  modified_base (9)..(9): 2'-hydroxy corresponding base
  modified_base (10)..(10): 2'-hydroxy corresponding base
  modified_base (11)..(11): 2'-hydroxy corresponding base
  modified_base (12)..(12): 2'-hydroxy corresponding base
  modified_base (13)..(13): 2'-hydroxy corresponding base
  modified_base (14)..(14): 2'-hydroxy corresponding base
  modified_base (15)..(15): 2'-hydroxy corresponding base
  modified_base (16)..(16): 2'-hydroxy corresponding base
  modified_base (17)..(17): 2'-hydroxy corresponding base
  modified_base (18)..(18): 2'-hydroxy corresponding base
  modified_base (19)..(19): 2'-hydroxy corresponding base
  modified_base (20)..(20): deoxythymidine
  modified_base (21)..(21): 5'-thio thymidine
cagaggaguccuccucgautt

SEQ ID NO: 173 - DNA, 21 bp, Artificial Sequence
  Description of Artificial Sequence: Synthetic oligonucleotide
  Description of Combined DNA/RNA Molecule: Synthetic oligonucleotide
  siRNAs to PCSK9
  modified_base (1)..(1): 2'-hydroxy corresponding base
  modified_base (2)..(2): 2'-hydroxy corresponding base
  modified_base (3)..(3): 2'-hydroxy corresponding base
  modified_base (4)..(4): 2'-hydroxy corresponding base
  modified_base (5)..(5): 2'-hydroxy corresponding base
  modified_base (6)..(6): 2'-hydroxy corresponding base
  modified_base (7)..(7): 2'-hydroxy corresponding base
  modified_base (8)..(8): 2'-hydroxy corresponding base
  modified_base (9)..(9): 2'-hydroxy corresponding base
  modified_base (10)..(10): 2'-hydroxy corresponding base
  modified_base (11)..(11): 2'-hydroxy corresponding base
  modified_base (12)..(12): 2'-hydroxy corresponding base
  modified_base (13)..(13): 2'-hydroxy corresponding base
  modified_base (14)..(14): 2'-hydroxy corresponding base
  modified_base (15)..(15): 2'-hydroxy corresponding base
  modified_base (16)..(16): 2'-hydroxy corresponding base
  modified_base (17)..(17): 2'-hydroxy corresponding base
  modified_base (18)..(18): 2'-hydroxy corresponding base
  modified_base (19)..(19): 2'-hydroxy corresponding base
  modified_base (20)..(20): deoxythymidine
  modified_base (21)..(21): deoxythymidine
ggaaccuggagcggauuactt

SEQ ID NO: 174 - DNA, 21 bp, Artificial Sequence
  Description of Artificial Sequence: Synthetic oligonucleotide
  Description of Combined DNA/RNA Molecule: Synthetic oligonucleotide
  siRNAs to PCSK9
  modified_base (1)..(1): 2'-hydroxy corresponding base
  modified_base (2)..(2): 2'-hydroxy corresponding base
  modified_base (3)..(3): 2'-hydroxy corresponding base
  modified_base (4)..(4): 2'-hydroxy corresponding base
  modified_base (5)..(5): 2'-hydroxy corresponding base
  modified_base (6)..(6): 2'-hydroxy corresponding base
  modified_base (7)..(7): 2'-hydroxy corresponding base
  modified_base (8)..(8): 2'-hydroxy corresponding base
  modified_base (9)..(9): 2'-hydroxy corresponding base
  modified_base (10)..(10): 2'-hydroxy corresponding base
  modified_base (11)..(11): 2'-hydroxy corresponding base
  modified_base (12)..(12): 2'-hydroxy corresponding base
  modified_base (13)..(13): 2'-hydroxy corresponding base
  modified_base (14)..(14): 2'-hydroxy corresponding base
  modified_base (15)..(15): 2'-hydroxy corresponding base
  modified_base (16)..(16): 2'-hydroxy corresponding base
  modified_base (17)..(17): 2'-hydroxy corresponding base
  modified_base (18)..(18): 2'-hydroxy corresponding base
  modified_base (19)..(19): 2'-hydroxy corresponding base
  modified_base (20)..(20): deoxythymidine
  modified_base (21)..(21): deoxythymidine
guaauccgcuccagguucctt

SEQ ID NO: 175 - DNA, 21 bp, Artificial Sequence
  Description of Artificial Sequence: Synthetic oligonucleotide
  Description of Combined DNA/RNA Molecule: Synthetic oligonucleotide
  siRNAs to PCSK9
  modified_base (1)..(1): 2'-hydroxy corresponding base
  modified_base (2)..(2): 2'-hydroxy corresponding base
  modified_base (3)..(3): 2'-hydroxy corresponding base
  modified_base (4)..(4): 2'-hydroxy corresponding base
  modified_base (5)..(5): 2'-hydroxy corresponding base
  modified_base (6)..(6): 2'-hydroxy corresponding base
  modified_base (7)..(7): 2'-hydroxy corresponding base
  modified_base (8)..(8): 2'-hydroxy corresponding base
  modified_base (9)..(9): 2'-hydroxy corresponding base
  modified_base (10)..(10): 2'-hydroxy corresponding base
  modified_base (11)..(11): 2'-hydroxy corresponding base
  modified_base (12)..(12): 2'-hydroxy corresponding base
  modified_base (13)..(13): 2'-hydroxy corresponding base
  modified_base (14)..(14): 2'-hydroxy corresponding base
  modified_base (15)..(15): 2'-hydroxy corresponding base
  modified_base (16)..(16): 2'-hydroxy corresponding base
  modified_base (17)..(17): 2'-hydroxy corresponding base
  modified_base (18)..(18): 2'-hydroxy corresponding base
  modified_base (19)..(19): 2'-hydroxy corresponding base
  modified_base (20)..(20): deoxythymidine
  modified_base (21)..(21): deoxythymidine
gaaccuggagcggauuacctt

SEQ ID NO: 176 - DNA, 21 bp, Artificial Sequence
  Description of Artificial Sequence: Synthetic oligonucleotide
  Description of Combined DNA/RNA Molecule: Synthetic oligonucleotide
  siRNAs to PCSK9
  modified_base (1)..(1): 2'-hydroxy corresponding base
  modified_base (2)..(2): 2'-hydroxy corresponding base
  modified_base (3)..(3): 2'-hydroxy corresponding base
  modified_base (4)..(4): 2'-hydroxy corresponding base
  modified_base (5)..(5): 2'-hydroxy corresponding base
  modified_base (6)..(6): 2'-hydroxy corresponding base
  modified_base (7)..(7): 2'-hydroxy corresponding base
  modified_base (8)..(8): 2'-hydroxy corresponding base
  modified_base (9)..(9): 2'-hydroxy corresponding base
  modified_base (10)..(10): 2'-hydroxy corresponding base
  modified_base (11)..(11): 2'-hydroxy corresponding base
  modified_base (12)..(12): 2'-hydroxy corresponding base
  modified_base (13)..(13): 2'-hydroxy corresponding base
  modified_base (14)..(14): 2'-hydroxy corresponding base
  modified_base (15)..(15): 2'-hydroxy corresponding base
  modified_base (16)..(16): 2'-hydroxy corresponding base
  modified_base (17)..(17): 2'-hydroxy corresponding base
  modified_base (18)..(18): 2'-hydroxy corresponding base
  modified_base (19)..(19): 2'-hydroxy corresponding base
  modified_base (20)..(20): deoxythymidine
  modified_base (21)..(21): deoxythymidine
gguaauccgcuccagguuctt

SEQ ID NO: 177 - DNA, 21 bp, Artificial Sequence
  Description of Artificial Sequence: Synthetic oligonucleotide
  Description of Combined DNA/RNA Molecule: Synthetic oligonucleotide
  siRNAs to PCSK9
  modified_base (1)..(1): 2'-hydroxy corresponding base
  modified_base (2)..(2): 2'-hydroxy corresponding base
  modified_base (3)..(3): 2'-hydroxy corresponding base
  modified_base (4)..(4): 2'-hydroxy corresponding base
  modified_base (5)..(5): 2'-hydroxy corresponding base
  modified_base (6)..(6): 2'-hydroxy corresponding base
  modified_base (7)..(7): 2'-hydroxy corresponding base
  modified_base (8)..(8): 2'-hydroxy corresponding base
  modified_base (9)..(9): 2'-hydroxy corresponding base
  modified_base (10)..(10): 2'-hydroxy corresponding base
  modified_base (11)..(11): 2'-hydroxy corresponding base
  modified_base (12)..(12): 2'-hydroxy corresponding base
  modified_base (13)..(13): 2'-hydroxy corresponding base
  modified_base (14)..(14): 2'-hydroxy corresponding base
  modified_base (15)..(15): 2'-hydroxy corresponding base
  modified_base (16)..(16): 2'-hydroxy corresponding base
  modified_base (17)..(17): 2'-hydroxy corresponding base
  modified_base (18)..(18): 2'-hydroxy corresponding base
  modified_base (19)..(19): 2'-hydroxy corresponding base
  modified_base (20)..(20): deoxythymidine
  modified_base (21)..(21): deoxythymidine
aaccuggagcggauuaccctt

SEQ ID NO: 178 - DNA, 21 bp, Artificial Sequence
  Description of Artificial Sequence: Synthetic oligonucleotide
  Description of Combined DNA/RNA Molecule: Synthetic oligonucleotide
  siRNAs to PCSK9
  modified_base (1)..(1): 2'-hydroxy corresponding base
  modified_base (2)..(2): 2'-hydroxy corresponding base
  modified_base (3)..(3): 2'-hydroxy corresponding base
  modified_base (4)..(4): 2'-hydroxy corresponding base
  modified_base (5)..(5): 2'-hydroxy corresponding base
  modified_base (6)..(6): 2'-hydroxy corresponding base
  modified_base (7)..(7): 2'-hydroxy corresponding base
  modified_base (8)..(8): 2'-hydroxy corresponding base
  modified_base (9)..(9): 2'-hydroxy corresponding base
  modified_base (10)..(10): 2'-hydroxy corresponding base
  modified_base (11)..(11): 2'-hydroxy corresponding base
  modified_base (12)..(12): 2'-hydroxy corresponding base
  modified_base (13)..(13): 2'-hydroxy corresponding base
  modified_base (14)..(14): 2'-hydroxy corresponding base
  modified_base (15)..(15): 2'-hydroxy corresponding base
  modified_base (16)..(16): 2'-hydroxy corresponding base
  modified_base (17)..(17): 2'-hydroxy corresponding base
  modified_base (18)..(18): 2'-hydroxy corresponding base
  modified_base (19)..(19): 2'-hydroxy corresponding base
  modified_base (20)..(20): deoxythymidine
  modified_base (21)..(21): deoxythymidine
ggguaauccgcuccagguutt

SEQ ID NO: 179 - DNA, 21 bp, Artificial Sequence
  Description of Artificial Sequence: Synthetic oligonucleotide
  Description of Combined DNA/RNA Molecule: Synthetic oligonucleotide
  siRNAs to PCSK9
  modified_base (1)..(1): 2'-hydroxy corresponding base
  modified_base (2)..(2): 2'-hydroxy corresponding base
  modified_base (3)..(3): 2'-hydroxy corresponding base
  modified_base (4)..(4): 2'-hydroxy corresponding base
  modified_base (5)..(5): 2'-hydroxy corresponding base
  modified_base (6)..(6): 2'-hydroxy corresponding base
  modified_base (7)..(7): 2'-hydroxy corresponding base
  modified_base (8)..(8): 2'-hydroxy corresponding base
  modified_base (9)..(9): 2'-hydroxy corresponding base
  modified_base (10)..(10): 2'-hydroxy corresponding base
  modified_base (11)..(11): 2'-hydroxy corresponding base
  modified_base (12)..(12): 2'-hydroxy corresponding base
  modified_base (13)..(13): 2'-hydroxy corresponding base
  modified_base (14)..(14): 2'-hydroxy corresponding base
  modified_base (15)..(15): 2'-hydroxy corresponding base
  modified_base (16)..(16): 2'-hydroxy corresponding base
  modified_base (17)..(17): 2'-hydroxy corresponding base
  modified_base (18)..(18): 2'-hydroxy corresponding base
  modified_base (19)..(19): 2'-hydroxy corresponding base
  modified_base (20)..(20): deoxythymidine
  modified_base (21)..(21): deoxythymidine
cccuccacgguaccgggcgtt

SEQ ID NO: 180 - DNA, 21 bp, Artificial Sequence
  Description of Artificial Sequence: Synthetic oligonucleotide
  Description of Combined DNA/RNA Molecule: Synthetic oligonucleotide
  siRNAs to PCSK9
  modified_base (1)..(1): 2'-hydroxy corresponding base
  modified_base (2)..(2): 2'-hydroxy corresponding base
  modified_base (3)..(3): 2'-hydroxy corresponding base
  modified_base (4)..(4): 2'-hydroxy corresponding base
  modified_base (5)..(5): 2'-hydroxy corresponding base
  modified_base (6)..(6): 2'-hydroxy corresponding base
  modified_base (7)..(7): 2'-hydroxy corresponding base
  modified_base (8)..(8): 2'-hydroxy corresponding base
  modified_base (9)..(9): 2'-hydroxy corresponding base
  modified_base (10)..(10): 2'-hydroxy corresponding base
  modified_base (11)..(11): 2'-hydroxy corresponding base
  modified_base (12)..(12): 2'-hydroxy corresponding base
  modified_base (13)..(13): 2'-hydroxy corresponding base
  modified_base (14)..(14): 2'-hydroxy corresponding base
  modified_base (15)..(15): 2'-hydroxy corresponding base
  modified_base (16)..(16): 2'-hydroxy corresponding base
  modified_base (17)..(17): 2'-hydroxy corresponding base
  modified_base (18)..(18): 2'-hydroxy corresponding base
  modified_base (19)..(19): 2'-hydroxy corresponding base
  modified_base (20)..(20): deoxythymidine
  modified_base (21)..(21): deoxythymidine
cgcccgguaccguggagggtt

SEQ ID NO: 181 - DNA, 21 bp, Artificial Sequence
  Description of Artificial Sequence: Synthetic oligonucleotide
  Description of Combined DNA/RNA Molecule: Synthetic oligonucleotide
  siRNAs to PCSK9
  modified_base (1)..(1): 2'-hydroxy corresponding base
  modified_base (2)..(2): 2'-hydroxy corresponding base
  modified_base (3)..(3): 2'-hydroxy corresponding base
  modified_base (4)..(4): 2'-hydroxy corresponding base
  modified_base (5)..(5): 2'-hydroxy corresponding base
  modified_base (6)..(6): 2'-hydroxy corresponding base
  modified_base (7)..(7): 2'-hydroxy corresponding base
  modified_base (8)..(8): 2'-hydroxy corresponding base
  modified_base (9)..(9): 2'-hydroxy corresponding base
  modified_base (10)..(10): 2'-hydroxy corresponding base
  modified_base (11)..(11): 2'-hydroxy corresponding base
  modified_base (12)..(12): 2'-hydroxy corresponding base
  modified_base (13)..(13): 2'-hydroxy corresponding base
  modified_base (14)..(14): 2'-hydroxy corresponding base
  modified_base (15)..(15): 2'-hydroxy corresponding base
  modified_base (16)..(16): 2'-hydroxy corresponding base
  modified_base (17)..(17): 2'-hydroxy corresponding base
  modified_base (18)..(18): 2'-hydroxy corresponding base
  modified_base (19)..(19): 2'-hydroxy corresponding base
  modified_base (20)..(20): deoxythymidine
  modified_base (21)..(21): 5'-thio thymidine
cacgguaccgggcggaugatt

SEQ ID NO: 182 - DNA, 21 bp, Artificial Sequence
  Description of Artificial Sequence: Synthetic oligonucleotide
  Description of Combined DNA/RNA Molecule: Synthetic oligonucleotide
  siRNAs to PCSK9
  modified_base (1)..(1): 2'-hydroxy corresponding base
  modified_base (2)..(2): 2'-hydroxy corresponding base
  modified_base (3)..(3): 2'-hydroxy corresponding base
  modified_base (4)..(4): 2'-hydroxy corresponding base
  modified_base (5)..(5): 2'-hydroxy corresponding base
  modified_base (6)..(6): 2'-hydroxy corresponding base
  modified_base (7)..(7): 2'-hydroxy corresponding base
  modified_base (8)..(8): 2'-hydroxy corresponding base
  modified_base (9)..(9): 2'-hydroxy corresponding base
  modified_base (10)..(10): 2'-hydroxy corresponding base
  modified_base (11)..(11): 2'-hydroxy corresponding base
  modified_base (12)..(12): 2'-hydroxy corresponding base
  modified_base (13)..(13): 2'-hydroxy corresponding base
  modified_base (14)..(14): 2'-hydroxy corresponding base
  modified_base (15)..(15): 2'-hydroxy corresponding base
  modified_base (16)..(16): 2'-hydroxy corresponding base
  modified_base (17)..(17): 2'-hydroxy corresponding base
  modified_base (18)..(18): 2'-hydroxy corresponding base
  modified_base (19)..(19): 2'-hydroxy corresponding base
  modified_base (20)..(20): deoxythymidine
  modified_base (21)..(21): 5'-thio thymidine
ucauccgcccgguaccgugtt

SEQ ID NO: 183 - DNA, 21 bp, Artificial Sequence
  Description of Artificial Sequence: Synthetic oligonucleotide
  Description of Combined DNA/RNA Molecule: Synthetic oligonucleotide
  siRNAs to PCSK9
  modified_base (1)..(1): 2'-O-methyl corresponding base
  modified_base (2)..(2): 2'-hydroxy corresponding base
  modified_base (3)..(3): 2'-O-methyl corresponding base
  modified_base (4)..(4): 2'-hydroxy corresponding base
  modified_base (5)..(5): 2'-hydroxy corresponding base
  modified_base (6)..(6): 2'-O-methyl corresponding base
  modified_base (7)..(7): 2'-hydroxy corresponding base
  modified_base (8)..(8): 2'-O-methyl corresponding base
  modified_base (9)..(9): 2'-O-methyl corresponding base
  modified_base (10)..(10): 2'-hydroxy corresponding base
  modified_base (11)..(11): 2'-hydroxy corresponding base
  modified_base (12)..(12): 2'-hydroxy corresponding base
  modified_base (13)..(13): 2'-O-methyl corresponding base
  modified_base (14)..(14): 2'-hydroxy corresponding base
  modified_base (15)..(15): 2'-hydroxy corresponding base
  modified_base (16)..(16): 2'-hydroxy corresponding base
  modified_base (17)..(17): 2'-O-methyl corresponding base
  modified_base (18)..(18): 2'-hydroxy corresponding base
  modified_base (19)..(19): 2'-hydroxy corresponding base
  modified_base (20)..(20): deoxythymidine
  modified_base (21)..(21): 5'-thio thymidine
cacgguaccgggcggaugatt

SEQ ID NO: 184 - DNA, 21 bp, Artificial Sequence
  Description of Artificial Sequence: Synthetic oligonucleotide
  Description of Combined DNA/RNA Molecule: Synthetic oligonucleotide
  siRNAs to PCSK9
  modified_base (1)..(1): 2'-hydroxy corresponding base
  modified_base (2)..(2): 2'-O-methyl corresponding base
  modified_base (3)..(3): 2'-hydroxy corresponding base
  modified_base (4)..(4): 2'-hydroxy corresponding base
  modified_base (5)..(5): 2'-hydroxy corresponding base
  modified_base (6)..(6): 2'-hydroxy corresponding base
  modified_base (7)..(7): 2'-hydroxy corresponding base
  modified_base (8)..(8): 2'-hydroxy corresponding base
  modified_base (9)..(9): 2'-hydroxy corresponding base
  modified_base (10)..(10): 2'-hydroxy corresponding base
  modified_base (11)..(11): 2'-hydroxy corresponding base
  modified_base (12)..(12): 2'-hydroxy corresponding base
  modified_base (13)..(13): 2'-O-methyl corresponding base
  modified_base (14)..(14): 2'-hydroxy corresponding base
  modified_base (15)..(15): 2'-hydroxy corresponding base
  modified_base (16)..(16): 2'-hydroxy corresponding base
  modified_base (17)..(17): 2'-hydroxy corresponding base
  modified_base (18)..(18): 2'-hydroxy corresponding base
  modified_base (19)..(19): 2'-hydroxy corresponding base
  modified_base (20)..(20): deoxythymidine
  modified_base (21)..(21): 5'-thio thymidine
ucauccgcccgguaccgugtt

SEQ ID NO: 185 - DNA, 21 bp, Artificial Sequence
  Description of Artificial Sequence: Synthetic oligonucleotide
  Description of Combined DNA/RNA Molecule: Synthetic oligonucleotide
  siRNAs to PCSK9
  modified_base (1)..(1): 2'-hydroxy corresponding base
  modified_base (2)..(2): 2'-hydroxy corresponding base
  modified_base (3)..(3): 2'-hydroxy corresponding base
  modified_base (4)..(4): 2'-hydroxy corresponding base
  modified_base (5)..(5): 2'-hydroxy corresponding base
  modified_base (6)..(6): 2'-hydroxy corresponding base
  modified_base (7)..(7): 2'-hydroxy corresponding base
  modified_base (8)..(8): 2'-hydroxy corresponding base
  modified_base (9)..(9): 2'-hydroxy corresponding base
  modified_base (10)..(10): 2'-hydroxy corresponding base
  modified_base (11)..(11): 2'-hydroxy corresponding base
  modified_base (12)..(12): 2'-hydroxy corresponding base
  modified_base (13)..(13): 2'-hydroxy corresponding base
  modified_base (14)..(14): 2'-hydroxy corresponding base
  modified_base (15)..(15): 2'-hydroxy corresponding base
  modified_base (16)..(16): 2'-hydroxy corresponding base
  modified_base (17)..(17): 2'-hydroxy corresponding base
  modified_base (18)..(18): 2'-hydroxy corresponding base
  modified_base (19)..(19): 2'-hydroxy corresponding base
  modified_base (20)..(20): deoxythymidine
  modified_base (21)..(21): 5'-thio thymidine
acgguaccgggcggaugaatt

SEQ ID NO: 186 - DNA, 21 bp, Artificial Sequence
  Description of Artificial Sequence: Synthetic oligonucleotide
  Description of Combined DNA/RNA Molecule: Synthetic oligonucleotide
  siRNAs to PCSK9
  modified_base (1)..(1): 2'-hydroxy corresponding base
  modified_base (2)..(2): 2'-hydroxy corresponding base
  modified_base (3)..(3): 2'-hydroxy corresponding base
  modified_base (4)..(4): 2'-hydroxy corresponding base
  modified_base (5)..(5): 2'-hydroxy corresponding base
  modified_base (6)..(6): 2'-hydroxy corresponding base
  modified_base (7)..(7): 2'-hydroxy corresponding base
  modified_base (8)..(8): 2'-hydroxy corresponding base
  modified_base (9)..(9): 2'-hydroxy corresponding base
  modified_base (10)..(10): 2'-hydroxy corresponding base
  modified_base (11)..(11): 2'-hydroxy corresponding base
  modified_base (12)..(12): 2'-hydroxy corresponding base
  modified_base (13)..(13): 2'-hydroxy corresponding base
  modified_base (14)..(14): 2'-hydroxy corresponding base
  modified_base (15)..(15): 2'-hydroxy corresponding base
  modified_base (16)..(16): 2'-hydroxy corresponding base
  modified_base (17)..(17): 2'-hydroxy corresponding base
  modified_base (18)..(18): 2'-hydroxy corresponding base
  modified_base (19)..(19): 2'-hydroxy corresponding base
  modified_base (20)..(20): deoxythymidine
  modified_base (21)..(21): 5'-thio thymidine
uucauccgcccgguaccgutt

SEQ ID NO: 187 - DNA, 21 bp, Artificial Sequence
  Description of Artificial Sequence: Synthetic oligonucleotide
  Description of Combined DNA/RNA Molecule: Synthetic oligonucleotide
  siRNAs to PCSK9
  modified_base (1)..(1): 2'-hydroxy corresponding base
  modified_base (2)..(2): 2'-O-methyl corresponding base
  modified_base (3)..(3): 2'-hydroxy corresponding base
  modified_base (4)..(4): 2'-hydroxy corresponding base
  modified_base (5)..(5): 2'-O-methyl corresponding base
  modified_base (6)..(6): 2'-hydroxy corresponding base
  modified_base (7)..(7): 2'-O-methyl corresponding base
  modified_base (8)..(8): 2'-O-methyl corresponding base
  modified_base (9)..(9): 2'-hydroxy corresponding base
  modified_base (10)..(10): 2'-hydroxy corresponding base
  modified_base (11)..(11): 2'-hydroxy corresponding base
  modified_base (12)..(12): 2'-O-methyl corresponding base
  modified_base (13)..(13): 2'-hydroxy corresponding base
  modified_base (14)..(14): 2'-hydroxy corresponding base
  modified_base (15)..(15): 2'-hydroxy corresponding base
  modified_base (16)..(16): 2'-O-methyl corresponding base
  modified_base (17)..(17): 2'-hydroxy corresponding base
  modified_base (18)..(18): 2'-hydroxy corresponding base
  modified_base (19)..(19): 2'-hydroxy corresponding base
  modified_base (20)..(20): deoxythymidine
  modified_base (21)..(21): 5'-thio thymidine
acgguaccgggcggaugaatt

SEQ ID NO: 188 - DNA, 21 bp, Artificial Sequence
  Description of Artificial Sequence: Synthetic oligonucleotide
  Description of Combined DNA/RNA Molecule: Synthetic oligonucleotide
  siRNAs to PCSK9
  modified_base (1)..(1): 2'-hydroxy corresponding base
  modified_base (2)..(2): 2'-hydroxy corresponding base
  modified_base (3)..(3): 2'-O-methyl corresponding base
  modified_base (4)..(4): 2'-hydroxy corresponding base
  modified_base (5)..(5): 2'-hydroxy corresponding base
  modified_base (6)..(6): 2'-hydroxy corresponding base
  modified_base (7)..(7): 2'-hydroxy corresponding base
  modified_base (8)..(8): 2'-hydroxy corresponding base
  modified_base (9)..(9): 2'-hydroxy corresponding base
  modified_base (10)..(10): 2'-hydroxy corresponding base
  modified_base (11)..(11): 2'-hydroxy corresponding base
  modified_base (12)..(12): 2'-hydroxy corresponding base
  modified_base (13)..(13): 2'-hydroxy corresponding base
  modified_base (14)..(14): 2'-O-methyl corresponding base
  modified_base (15)..(15): 2'-hydroxy corresponding base
  modified_base (16)..(16): 2'-hydroxy corresponding base
  modified_base (17)..(17): 2'-hydroxy corresponding base
  modified_base (18)..(18): 2'-hydroxy corresponding base
  modified_base (19)..(19): 2'-hydroxy corresponding base
  modified_base (20)..(20): deoxythymidine
  modified_base (21)..(21): 5'-thio thymidine
uucauccgcccgguaccgutt

SEQ ID NO: 189 - DNA, 21 bp, Artificial Sequence
  Description of Artificial Sequence: Synthetic oligonucleotide
  Description of Combined DNA/RNA Molecule: Synthetic oligonucleotide
  siRNAs to PCSK9
  modified_base (1)..(1): 2'-hydroxy corresponding base
  modified_base (2)..(2): 2'-hydroxy corresponding base
  modified_base (3)..(3): 2'-hydroxy corresponding base
  modified_base (4)..(4): 2'-hydroxy corresponding base
  modified_base (5)..(5): 2'-hydroxy corresponding base
  modified_base (6)..(6): 2'-hydroxy corresponding base
  modified_base (7)..(7): 2'-hydroxy corresponding base
  modified_base (8)..(8): 2'-hydroxy corresponding base
  modified_base (9)..(9): 2'-hydroxy corresponding base
  modified_base (10)..(10): 2'-hydroxy corresponding base
  modified_base (11)..(11): 2'-hydroxy corresponding base
  modified_base (12)..(12): 2'-hydroxy corresponding base
  modified_base (13)..(13): 2'-hydroxy corresponding base
  modified_base (14)..(14): 2'-hydroxy corresponding base
  modified_base (15)..(15): 2'-hydroxy corresponding base
  modified_base (16)..(16): 2'-hydroxy corresponding base
  modified_base (17)..(17): 2'-hydroxy corresponding base
  modified_base (18)..(18): 2'-hydroxy corresponding base
  modified_base (19)..(19): 2'-hydroxy corresponding base
  modified_base (20)..(20): deoxythymidine
  modified_base (21)..(21): 5'-thio thymidine
cgguaccgggcggaugaautt

SEQ ID NO: 190 - DNA, 21 bp, Artificial Sequence
  Description of Artificial Sequence: Synthetic oligonucleotide
  Description of Combined DNA/RNA Molecule: Synthetic oligonucleotide
  siRNAs to PCSK9
  modified_base (1)..(1): 2'-hydroxy corresponding base
  modified_base (2)..(2): 2'-hydroxy corresponding base
  modified_base (3)..(3): 2'-hydroxy corresponding base
  modified_base (4)..(4): 2'-hydroxy corresponding base
  modified_base (5)..(5): 2'-hydroxy corresponding base
  modified_base (6)..(6): 2'-hydroxy corresponding base
  modified_base (7)..(7): 2'-hydroxy corresponding base
  modified_base (8)..(8): 2'-hydroxy corresponding base
  modified_base (9)..(9): 2'-hydroxy corresponding base
  modified_base (10)..(10): 2'-hydroxy corresponding base
  modified_base (11)..(11): 2'-hydroxy corresponding base
  modified_base (12)..(12): 2'-hydroxy corresponding base
  modified_base (13)..(13): 2'-hydroxy corresponding base
  modified_base (14)..(14): 2'-hydroxy corresponding base
  modified_base (15)..(15): 2'-hydroxy corresponding base
  modified_base (16)..(16): 2'-hydroxy corresponding base
  modified_base (17)..(17): 2'-hydroxy corresponding base
  modified_base (18)..(18): 2'-hydroxy corresponding base
  modified_base (19)..(19): 2'-hydroxy corresponding base
  modified_base (20)..(20): deoxythymidine
  modified_base (21)..(21): 5'-thio thymidine
auucauccgcccgguaccgtt

SEQ ID NO: 191 - DNA, 21 bp, Artificial Sequence
  Description of Artificial Sequence: Synthetic oligonucleotide
  Description of Combined DNA/RNA Molecule: Synthetic oligonucleotide
  siRNAs to PCSK9
  modified_base (1)..(1): 2'-O-methyl corresponding base
  modified_base (2)..(2): 2'-hydroxy corresponding base
  modified_base (3)..(3): 2'-hydroxy corresponding base
  modified_base (4)..(4): 2'-O-methyl corresponding base
  modified_base (5)..(5): 2'-hydroxy corresponding base
  modified_base (6)..(6): 2'-O-methyl corresponding base
  modified_base (7)..(7): 2'-O-methyl corresponding base
  modified_base (8)..(8): 2'-hydroxy corresponding base
  modified_base (9)..(9): 2'-hydroxy corresponding base
  modified_base (10)..(10): 2'-hydroxy corresponding base
  modified_base (11)..(11): 2'-O-methyl corresponding base
  modified_base (12)..(12): 2'-hydroxy corresponding base
  modified_base (13)..(13): 2'-hydroxy corresponding base
  modified_base (14)..(14): 2'-hydroxy corresponding base
  modified_base (15)..(15): 2'-O-methyl corresponding base
  modified_base (16)..(16): 2'-hydroxy corresponding base
  modified_base (17)..(17): 2'-hydroxy corresponding base
  modified_base (18)..(18): 2'-hydroxy corresponding base
  modified_base (19)..(19): 2'-O-methyl corresponding base
  modified_base (20)..(20): deoxythymidine
  modified_base (21)..(21): 5'-thio thymidine
cgguaccgggcggaugaautt

SEQ ID NO: 192 - DNA, 21 bp, Artificial Sequence
  Description of Artificial Sequence: Synthetic oligonucleotide
  Description of Combined DNA/RNA Molecule: Synthetic oligonucleotide
  siRNAs to PCSK9
  modified_base (1)..(1): 2'-hydroxy corresponding base
  modified_base (2)..(2): 2'-hydroxy corresponding base
  modified_base (3)..(3): 2'-hydroxy corresponding base
  modified_base (4)..(4): 2'-O-methyl corresponding base
  modified_base (5)..(5): 2'-hydroxy corresponding base
  modified_base (6)..(6): 2'-hydroxy corresponding base
  modified_base (7)..(7): 2'-hydroxy corresponding base
  modified_base (8)..(8): 2'-hydroxy corresponding base
  modified_base (9)..(9): 2'-hydroxy corresponding base
  modified_base (10)..(10): 2'-hydroxy corresponding base
  modified_base (11)..(11): 2'-hydroxy corresponding base
  modified_base (12)..(12): 2'-hydroxy corresponding base
  modified_base (13)..(13): 2'-hydroxy corresponding base
  modified_base (14)..(14): 2'-hydroxy corresponding base
  modified_base (15)..(15): 2'-O-methyl corresponding base
  modified_base (16)..(16): 2'-hydroxy corresponding base
  modified_base (17)..(17): 2'-hydroxy corresponding base
  modified_base (18)..(18): 2'-hydroxy corresponding base
  modified_base (19)..(19): 2'-hydroxy corresponding base
  modified_base (20)..(20): deoxythymidine
  modified_base (21)..(21): 5'-thio thymidine
auucauccgcccgguaccgtt

SEQ ID NO: 193 - DNA, 21 bp, Artificial Sequence
  Description of Artificial Sequence: Synthetic oligonucleotide
  Description of Combined DNA/RNA Molecule: Synthetic oligonucleotide
  siRNAs to PCSK9
  modified_base (1)..(1): 2'-hydroxy corresponding base
  modified_base (2)..(2): 2'-hydroxy corresponding base
  modified_base (3)..(3): 2'-hydroxy corresponding base
  modified_base (4)..(4): 2'-hydroxy corresponding base
  modified_base (5)..(5): 2'-hydroxy corresponding base
  modified_base (6)..(6): 2'-hydroxy corresponding base
  modified_base (7)..(7): 2'-hydroxy corresponding base
  modified_base (8)..(8): 2'-hydroxy corresponding base
  modified_base (9)..(9): 2'-hydroxy corresponding base
  modified_base (10)..(10): 2'-hydroxy corresponding base
  modified_base (11)..(11): 2'-hydroxy corresponding base
  modified_base (12)..(12): 2'-hydroxy corresponding base
  modified_base (13)..(13): 2'-hydroxy corresponding base
  modified_base (14)..(14): 2'-hydroxy corresponding base
  modified_base (15)..(15): 2'-hydroxy corresponding base
  modified_base (16)..(16): 2'-hydroxy corresponding base
  modified_base (17)..(17): 2'-hydroxy corresponding base
  modified_base (18)..(18): 2'-hydroxy corresponding base
  modified_base (19)..(19): 2'-hydroxy corresponding base
  modified_base (20)..(20): deoxythymidine
  modified_base (21)..(21): 5'-thio thymidine
gguaccgggcggaugaauatt

SEQ ID NO: 194 - DNA, 21 bp, Artificial Sequence
  Description of Artificial Sequence: Synthetic oligonucleotide
  Description of Combined DNA/RNA Molecule: Synthetic oligonucleotide
  siRNAs to PCSK9
  modified_base (1)..(1): 2'-hydroxy corresponding base
  modified_base (2)..(2): 2'-hydroxy corresponding base
  modified_base (3)..(3): 2'-hydroxy corresponding base
  modified_base (4)..(4): 2'-hydroxy corresponding base
  modified_base (5)..(5): 2'-hydroxy corresponding base
  modified_base (6)..(6): 2'-hydroxy corresponding base
  modified_base (7)..(7): 2'-hydroxy corresponding base
  modified_base (8)..(8): 2'-hydroxy corresponding base
  modified_base (9)..(9): 2'-hydroxy corresponding base
  modified_base (10)..(10): 2'-hydroxy corresponding base
  modified_base (11)..(11): 2'-hydroxy corresponding base
  modified_base (12)..(12): 2'-hydroxy corresponding base
  modified_base (13)..(13): 2'-hydroxy corresponding base
  modified_base (14)..(14): 2'-hydroxy corresponding base
  modified_base (15)..(15): 2'-hydroxy corresponding base
  modified_base (16)..(16): 2'-hydroxy corresponding base
  modified_base (17)..(17): 2'-hydroxy corresponding base
  modified_base (18)..(18): 2'-hydroxy corresponding base
  modified_base (19)..(19): 2'-hydroxy corresponding base
  modified_base (20)..(20): deoxythymidine
  modified_base (21)..(21): 5'-thio thymidine
uauucauccgcccgguacctt

SEQ ID NO: 195 - DNA, 21 bp, Artificial Sequence
  Description of Artificial Sequence: Synthetic oligonucleotide
  Description of Combined DNA/RNA Molecule: Synthetic oligonucleotide
  siRNAs to PCSK9
  modified_base (1)..(1): 2'-hydroxy corresponding base
  modified_base (2)..(2): 2'-hydroxy corresponding base
  modified_base (3)..(3): 2'-O-methyl corresponding base
  modified_base (4)..(4): 2'-hydroxy corresponding base
  modified_base (5)..(5): 2'-O-methyl corresponding base
  modified_base (6)..(6): 2'-O-methyl corresponding base
  modified_base (7)..(7): 2'-hydroxy corresponding base
  modified_base (8)..(8): 2'-hydroxy corresponding base
  modified_base (9)..(9): 2'-hydroxy corresponding base
  modified_base (10)..(10): 2'-O-methyl corresponding base
  modified_base (11)..(11): 2'-hydroxy corresponding base
  modified_base (12)..(12): 2'-hydroxy corresponding base
  modified_base (13)..(13): 2'-hydroxy corresponding base
  modified_base (14)..(14): 2'-O-methyl corresponding base
  modified_base (15)..(15): 2'-hydroxy corresponding base
  modified_base (16)..(16): 2'-hydroxy corresponding base
  modified_base (17)..(17): 2'-hydroxy corresponding base
  modified_base (18)..(18): 2'-O-methyl corresponding base
  modified_base (19)..(19): 2'-hydroxy corresponding base
  modified_base (20)..(20): deoxythymidine
  modified_base (21)..(21): 5'-thio thymidine
gguaccgggcggaugaauatt

SEQ ID NO: 196 - DNA, 21 bp, Artificial Sequence
  Description of Artificial Sequence: Synthetic oligonucleotide
  Description of Combined DNA/RNA Molecule: Synthetic oligonucleotide
  siRNAs to PCSK9
  modified_base (1)..(1): 2'-O-methyl corresponding base
  modified_base (2)..(2): 2'-hydroxy corresponding base
  modified_base (3)..(3): 2'-hydroxy corresponding base
  modified_base (4)..(4): 2'-hydroxy corresponding base
  modified_base (5)..(5): 2'-O-methyl corresponding base
  modified_base (6)..(6): 2'-hydroxy corresponding base
  modified_base (7)..(7): 2'-hydroxy corresponding base
  modified_base (8)..(8): 2'-hydroxy corresponding base
  modified_base (9)..(9): 2'-hydroxy corresponding base
  modified_base (10)..(10): 2'-hydroxy corresponding base
  modified_base (11)..(11): 2'-hydroxy corresponding base
  modified_base (12)..(12): 2'-hydroxy corresponding base
  modified_base (13)..(13): 2'-hydroxy corresponding base
  modified_base (14)..(14): 2'-hydroxy corresponding base
  modified_base (15)..(15): 2'-hydroxy corresponding base
  modified_base (16)..(16): 2'-O-methyl corresponding base
  modified_base (17)..(17): 2'-hydroxy corresponding base
  modified_base (18)..(18): 2'-hydroxy corresponding base
  modified_base (19)..(19): 2'-hydroxy corresponding base
  modified_base (20)..(20): deoxythymidine
  modified_base (21)..(21): 5'-thio thymidine
uauucauccgcccgguacctt

SEQ ID NO: 197 - DNA, 21 bp, Artificial Sequence
  Description of Artificial Sequence: Synthetic oligonucleotide
  Description of Combined DNA/RNA Molecule: Synthetic oligonucleotide
  siRNAs to PCSK9
  modified_base (1)..(1): 2'-hydroxy corresponding base
  modified_base (2)..(2): 2'-hydroxy corresponding base
  modified_base (3)..(3): 2'-hydroxy corresponding base
  modified_base (4)..(4): 2'-hydroxy corresponding base
  modified_base (5)..(5): 2'-hydroxy corresponding base
  modified_base (6)..(6): 2'-hydroxy corresponding base
  modified_base (7)..(7): 2'-hydroxy corresponding base
  modified_base (8)..(8): 2'-hydroxy corresponding base
  modified_base (9)..(9): 2'-hydroxy corresponding base
  modified_base (10)..(10): 2'-hydroxy corresponding base
  modified_base (11)..(11): 2'-hydroxy corresponding base
  modified_base (12)..(12): 2'-hydroxy corresponding base
  modified_base (13)..(13): 2'-hydroxy corresponding base
  modified_base (14)..(14): 2'-hydroxy corresponding base
  modified_base (15)..(15): 2'-hydroxy corresponding base
  modified_base (16)..(16): 2'-hydroxy corresponding base
  modified_base (17)..(17): 2'-hydroxy corresponding base
  modified_base (18)..(18): 2'-hydroxy corresponding base
  modified_base (19)..(19): 2'-hydroxy corresponding base
  modified_base (20)..(20): deoxythymidine
  modified_base (21)..(21): 5'-thio thymidine
guaccgggcggaugaauactt

SEQ ID NO: 198 - DNA, 21 bp, Artificial Sequence
  Description of Artificial Sequence: Synthetic oligonucleotide
  Description of Combined DNA/RNA Molecule: Synthetic oligonucleotide
  siRNAs to PCSK9
  modified_base (1)..(1): 2'-hydroxy corresponding base
  modified_base (2)..(2): 2'-hydroxy corresponding base
  modified_base (3)..(3): 2'-hydroxy corresponding base
  modified_base (4)..(4): 2'-hydroxy corresponding base
  modified_base (5)..(5): 2'-hydroxy corresponding base
  modified_base (6)..(6): 2'-hydroxy corresponding base
  modified_base (7)..(7): 2'-hydroxy corresponding base
  modified_base (8)..(8): 2'-hydroxy corresponding base
  modified_base (9)..(9): 2'-hydroxy corresponding base
  modified_base (10)..(10): 2'-hydroxy corresponding base
  modified_base (11)..(11): 2'-hydroxy corresponding base
  modified_base (12)..(12): 2'-hydroxy corresponding base
  modified_base (13)..(13): 2'-hydroxy corresponding base
  modified_base (14)..(14): 2'-hydroxy corresponding base
  modified_base (15)..(15): 2'-hydroxy corresponding base
  modified_base (16)..(16): 2'-hydroxy corresponding base
  modified_base (17)..(17): 2'-hydroxy corresponding base
  modified_base (18)..(18): 2'-hydroxy corresponding base
  modified_base (19)..(19): 2'-hydroxy corresponding base
  modified_base (20)..(20): deoxythymidine
  modified_base (21)..(21): 5'-thio thymidine
guauucauccgcccgguactt

SEQ ID NO: 199 - DNA, 21 bp, Artificial Sequence
  Description of Artificial Sequence: Synthetic oligonucleotide
  Description of Combined DNA/RNA Molecule: Synthetic oligonucleotide
  siRNAs to PCSK9
  modified_base (1)..(1): 2'-hydroxy corresponding base
  modified_base (2)..(2): 2'-O-methyl corresponding base
  modified_base (3)..(3): 2'-hydroxy corresponding base
  modified_base (4)..(4): 2'-O-methyl corresponding base
  modified_base (5)..(5): 2'-O-methyl corresponding base
  modified_base (6)..(6): 2'-hydroxy corresponding base
  modified_base (7)..(7): 2'-hydroxy corresponding base
  modified_base (8)..(8): 2'-hydroxy corresponding base
  modified_base (9)..(9): 2'-O-methyl corresponding base
  modified_base (10)..(10): 2'-hydroxy corresponding base
  modified_base (11)..(11): 2'-hydroxy corresponding base
  modified_base (12)..(12): 2'-hydroxy corresponding base
  modified_base (13)..(13): 2'-O-methyl corresponding base
  modified_base (14)..(14): 2'-hydroxy corresponding base
  modified_base (15)..(15): 2'-hydroxy corresponding base
  modified_base (16)..(16): 2'-hydroxy corresponding base
  modified_base (17)..(17): 2'-O-methyl corresponding base
  modified_base (18)..(18): 2'-hydroxy corresponding base
  modified_base (19)..(19): 2'-O-methyl corresponding base
  modified_base (20)..(20): deoxythymidine
  modified_base (21)..(21): 5'-thio thymidine
guaccgggcggaugaauactt

SEQ ID NO: 200 - DNA, 21 bp, Artificial Sequence
  Description of Artificial Sequence: Synthetic oligonucleotide
  Description of Combined DNA/RNA Molecule: Synthetic oligonucleotide
  siRNAs to PCSK9
  modified_base (1)..(1): 2'-hydroxy corresponding base
  modified_base (2)..(2): 2'-O-methyl corresponding base
  modified_base (3)..(3): 2'-hydroxy corresponding base
  modified_base (4)..(4): 2'-hydroxy corresponding base
  modified_base (5)..(5): 2'-hydroxy corresponding base
  modified_base (6)..(6): 2'-O-methyl corresponding base
  modified_base (7)..(7): 2'-hydroxy corresponding base
  modified_base (8)..(8): 2'-hydroxy corresponding base
  modified_base (9)..(9): 2'-hydroxy corresponding base
  modified_base (10)..(10): 2'-hydroxy corresponding base
  modified_base (11)..(11): 2'-hydroxy corresponding base
  modified_base (12)..(12): 2'-hydroxy corresponding base
  modified_base (13)..(13): 2'-hydroxy corresponding base
  modified_base (14)..(14): 2'-hydroxy corresponding base
  modified_base (15)..(15): 2'-hydroxy corresponding base
  modified_base (16)..(16): 2'-hydroxy corresponding base
  modified_base (17)..(17): 2'-O-methyl corresponding base
  modified_base (18)..(18): 2'-hydroxy corresponding base
  modified_base (19)..(19): 2'-hydroxy corresponding base
  modified_base (20)..(20): deoxythymidine
  modified_base (21)..(21): 5'-thio thymidine
guauucauccgcccgguactt

SEQ ID NO: 201 - DNA, 21 bp, Artificial Sequence
  Description of Artificial Sequence: Synthetic oligonucleotide
  Description of Combined DNA/RNA Molecule: Synthetic oligonucleotide
  siRNAs to PCSK9
  modified_base (1)..(1): 2'-hydroxy corresponding base
  modified_base (2)..(2): 2'-hydroxy corresponding base
  modified_base (3)..(3): 2'-hydroxy corresponding base
  modified_base (4)..(4): 2'-hydroxy corresponding base
  modified_base (5)..(5): 2'-hydroxy corresponding base
  modified_base (6)..(6): 2'-hydroxy corresponding base
  modified_base (7)..(7): 2'-hydroxy corresponding base
  modified_base (8)..(8): 2'-hydroxy corresponding base
  modified_base (9)..(9): 2'-hydroxy corresponding base
  modified_base (10)..(10): 2'-hydroxy corresponding base
  modified_base (11)..(11): 2'-hydroxy corresponding base
  modified_base (12)..(12): 2'-hydroxy corresponding base
  modified_base (13)..(13): 2'-hydroxy corresponding base
  modified_base (14)..(14): 2'-hydroxy corresponding base
  modified_base (15)..(15): 2'-hydroxy corresponding base
  modified_base (16)..(16): 2'-hydroxy corresponding base
  modified_base (17)..(17): 2'-hydroxy corresponding base
  modified_base (18)..(18): 2'-hydroxy corresponding base
  modified_base (19)..(19): 2'-hydroxy corresponding base
  modified_base (20)..(20): deoxythymidine
  modified_base (21)..(21): 5'-thio thymidine
accgggcggaugaauaccatt

SEQ ID NO: 202 - DNA, 21 bp, Artificial Sequence
  Description of Artificial Sequence: Synthetic oligonucleotide
  Description of Combined DNA/RNA Molecule: Synthetic oligonucleotide
  siRNAs to PCSK9
  modified_base (1)..(1): 2'-hydroxy corresponding base
  modified_base (2)..(2): 2'-hydroxy corresponding base
  modified_base (3)..(3): 2'-hydroxy corresponding base
  modified_base (4)..(4): 2'-hydroxy corresponding base
  modified_base (5)..(5): 2'-hydroxy corresponding base
  modified_base (6)..(6): 2'-hydroxy corresponding base
  modified_base (7)..(7): 2'-hydroxy corresponding base
  modified_base (8)..(8): 2'-hydroxy corresponding base
  modified_base (9)..(9): 2'-hydroxy corresponding base
  modified_base (10)..(10): 2'-hydroxy corresponding base
  modified_base (11)..(11): 2'-hydroxy corresponding base
  modified_base (12)..(12): 2'-hydroxy corresponding base
  modified_base (13)..(13): 2'-hydroxy corresponding base
  modified_base (14)..(14): 2'-hydroxy corresponding base
  modified_base (15)..(15): 2'-hydroxy corresponding base
  modified_base (16)..(16): 2'-hydroxy corresponding base
  modified_base (17)..(17): 2'-hydroxy corresponding base
  modified_base (18)..(18): 2'-hydroxy corresponding base
  modified_base (19)..(19): 2'-hydroxy corresponding base
  modified_base (20)..(20): deoxythymidine
  modified_base (21)..(21): 5'-thio thymidine
ugguauucauccgcccggutt

SEQ ID NO: 203 - DNA, 21 bp, Artificial Sequence
  Description of Artificial Sequence: Synthetic oligonucleotide
  Description of Combined DNA/RNA Molecule: Synthetic oligonucleotide
  siRNAs to PCSK9
  modified_base (1)..(1): 2'-hydroxy corresponding base
  modified_base (2)..(2): 2'-O-methyl corresponding base
  modified_base (3)..(3): 2'-O-methyl corresponding base
  modified_base (4)..(4): 2'-hydroxy corresponding base
  modified_base (5)..(5): 2'-hydroxy corresponding base
  modified_base (6)..(6): 2'-hydroxy corresponding base
  modified_base (7)..(7): 2'-O-methyl corresponding base
  modified_base (8)..(8): 2'-hydroxy corresponding base
  modified_base (9)..(9): 2'-hydroxy corresponding base
  modified_base (10)..(10): 2'-hydroxy corresponding base
  modified_base (11)..(11): 2'-O-methyl corresponding base
  modified_base (12)..(12): 2'-hydroxy corresponding base
  modified_base (13)..(13): 2'-hydroxy corresponding base
  modified_base (14)..(14): 2'-hydroxy corresponding base
  modified_base (15)..(15): 2'-O-methyl corresponding base
  modified_base (16)..(16): 2'-hydroxy corresponding base
  modified_base (17)..(17): 2'-O-methyl corresponding base
  modified_base (18)..(18): 2'-O-methyl corresponding base
  modified_base (19)..(19): 2'-hydroxy corresponding base
  modified_base (20)..(20): deoxythymidine
  modified_base (21)..(21): 5'-thio thymidine
accgggcggaugaauaccatt

SEQ ID NO: 204 - DNA, 21 bp, Artificial Sequence
  Description of Artificial Sequence: Synthetic oligonucleotide
  Description of Combined DNA/RNA Molecule: Synthetic oligonucleotide
  siRNAs to PCSK9
  modified_base (1)..(1): 2'-hydroxy corresponding base
  modified_base (2)..(2): 2'-hydroxy corresponding base
  modified_base (3)..(3): 2'-hydroxy corresponding base
  modified_base (4)..(4): 2'-O-methyl corresponding base
  modified_base (5)..(5): 2'-hydroxy corresponding base
  modified_base (6)..(6): 2'-hydroxy corresponding base
  modified_base (7)..(7): 2'-hydroxy corresponding base
  modified_base (8)..(8): 2'-O-methyl corresponding base
  modified_base (9)..(9): 2'-hydroxy corresponding base
  modified_base (10)..(10): 2'-hydroxy corresponding base
  modified_base (11)..(11): 2'-hydroxy corresponding base
  modified_base (12)..(12): 2'-hydroxy corresponding base
  modified_base (13)..(13): 2'-hydroxy corresponding base
  modified_base (14)..(14): 2'-hydroxy corresponding base
  modified_base (15)..(15): 2'-hydroxy corresponding base
  modified_base (16)..(16): 2'-hydroxy corresponding base
  modified_base (17)..(17): 2'-hydroxy corresponding base
  modified_base (18)..(18): 2'-hydroxy corresponding base
  modified_base (19)..(19): 2'-hydroxy corresponding base
  modified_base (20)..(20): deoxythymidine
  modified_base (21)..(21): 5'-thio thymidine
ugguauucauccgcccggutt

SEQ ID NO: 205 - DNA, 21 bp, Artificial Sequence
  Description of Artificial Sequence: Synthetic oligonucleotide
  Description of Combined DNA/RNA Molecule: Synthetic oligonucleotide
  siRNAs to PCSK9
  modified_base (1)..(1): 2'-hydroxy corresponding base
  modified_base (2)..(2): 2'-hydroxy corresponding base
  modified_base (3)..(3): 2'-hydroxy corresponding base
  modified_base (4)..(4): 2'-hydroxy corresponding base
  modified_base (5)..(5): 2'-hydroxy corresponding base
  modified_base (6)..(6): 2'-hydroxy corresponding base
  modified_base (7)..(7): 2'-hydroxy corresponding base
  modified_base (8)..(8): 2'-hydroxy corresponding base
  modified_base (9)..(9): 2'-hydroxy corresponding base
  modified_base (10)..(10): 2'-hydroxy corresponding base
  modified_base (11)..(11): 2'-hydroxy corresponding base
  modified_base (12)..(12): 2'-hydroxy corresponding base
  modified_base (13)..(13): 2'-hydroxy corresponding base
  modified_base (14)..(14): 2'-hydroxy corresponding base
  modified_base (15)..(15): 2'-hydroxy corresponding base
  modified_base (16)..(16): 2'-hydroxy corresponding base
  modified_base (17)..(17): 2'-hydroxy corresponding base
  modified_base (18)..(18): 2'-hydroxy corresponding base
  modified_base (19)..(19): 2'-hydroxy corresponding base
  modified_base (20)..(20): deoxythymidine
  modified_base (21)..(21): 5'-thio thymidine
ccgggcggaugaauaccagtt

SEQ ID NO: 206 - DNA, 21 bp, Artificial Sequence
  Description of Artificial Sequence: Synthetic oligonucleotide
  Description of Combined DNA/RNA Molecule: Synthetic oligonucleotide
  siRNAs to PCSK9
  modified_base (1)..(1): 2'-hydroxy corresponding base
  modified_base (2)..(2): 2'-hydroxy corresponding base
  modified_base (3)..(3): 2'-hydroxy corresponding base
  modified_base (4)..(4): 2'-hydroxy corresponding base
  modified_base (5)..(5): 2'-hydroxy corresponding base
  modified_base (6)..(6): 2'-hydroxy corresponding base
  modified_base (7)..(7): 2'-hydroxy corresponding base
  modified_base (8)..(8): 2'-hydroxy corresponding base
  modified_base (9)..(9): 2'-hydroxy corresponding base
  modified_base (10)..(10): 2'-hydroxy corresponding base
  modified_base (11)..(11): 2'-hydroxy corresponding base
  modified_base (12)..(12): 2'-hydroxy corresponding base
  modified_base (13)..(13): 2'-hydroxy corresponding base
  modified_base (14)..(14): 2'-hydroxy corresponding base
  modified_base (15)..(15): 2'-hydroxy corresponding base
  modified_base (16)..(16): 2'-hydroxy corresponding base
  modified_base (17)..(17): 2'-hydroxy corresponding base
  modified_base (18)..(18): 2'-hydroxy corresponding base
  modified_base (19)..(19): 2'-hydroxy corresponding base
  modified_base (20)..(20): deoxythymidine
  modified_base (21)..(21): 5'-thio thymidine
cugguauucauccgcccggtt

SEQ ID NO: 207 - DNA, 21 bp, Artificial Sequence
  Description of Artificial Sequence: Synthetic oligonucleotide
  Description of Combined DNA/RNA Molecule: Synthetic oligonucleotide
  siRNAs to PCSK9
  modified_base (1)..(1): 2'-O-methyl corresponding base
  modified_base (2)..(2): 2'-O-methyl corresponding base
  modified_base (3)..(3): 2'-hydroxy corresponding base
  modified_base (4)..(4): 2'-hydroxy corresponding base
  modified_base (5)..(5): 2'-hydroxy corresponding base
  modified_base (6)..(6): 2'-O-methyl corresponding base
  modified_base (7)..(7): 2'-hydroxy corresponding base
  modified_base (8)..(8): 2'-hydroxy corresponding base
  modified_base (9)..(9): 2'-hydroxy corresponding base
  modified_base (10)..(10): 2'-O-methyl corresponding base
  modified_base (11)..(11): 2'-hydroxy corresponding base
  modified_base (12)..(12): 2'-hydroxy corresponding base
  modified_base (13)..(13): 2'-hydroxy corresponding base
  modified_base (14)..(14): 2'-O-methyl corresponding base
  modified_base (15)..(15): 2'-hydroxy corresponding base
  modified_base (16)..(16): 2'-O-methyl corresponding base
  modified_base (17)..(17): 2'-O-methyl corresponding base
  modified_base (18)..(18): 2'-hydroxy corresponding base
  modified_base (19)..(19): 2'-hydroxy corresponding base
  modified_base (20)..(20): deoxythymidine
  modified_base (21)..(21): 5'-thio thymidine
ccgggcggaugaauaccagtt

SEQ ID NO: 208 - DNA, 21 bp, Artificial Sequence
  Description of Artificial Sequence: Synthetic oligonucleotide
  Description of Combined DNA/RNA Molecule: Synthetic oligonucleotide
  siRNAs to PCSK9
  modified_base (1)..(1): 2'-hydroxy corresponding base
  modified_base (2)..(2): 2'-hydroxy corresponding base
  modified_base (3)..(3): 2'-hydroxy corresponding base
  modified_base (4)..(4): 2'-hydroxy corresponding base
  modified_base (5)..(5): 2'-O-methyl corresponding base
  modified_base (6)..(6): 2'-hydroxy corresponding base
  modified_base (7)..(7): 2'-hydroxy corresponding base
  modified_base (8)..(8): 2'-hydroxy corresponding base
  modified_base (9)..(9): 2'-O-methyl corresponding base
  modified_base (10)..(10): 2'-hydroxy corresponding base
  modified_base (11)..(11): 2'-hydroxy corresponding base
  modified_base (12)..(12): 2'-hydroxy corresponding base
  modified_base (13)..(13): 2'-hydroxy corresponding base
  modified_base (14)..(14): 2'-hydroxy corresponding base
  modified_base (15)..(15): 2'-hydroxy corresponding base
  modified_base (16)..(16): 2'-hydroxy corresponding base
  modified_base (17)..(17): 2'-hydroxy corresponding base
  modified_base (18)..(18): 2'-hydroxy corresponding base
  modified_base (19)..(19): 2'-hydroxy corresponding base
  modified_base (20)..(20): deoxythymidine
  modified_base (21)..(21): 5'-thio thymidine
cugguauucauccgcccggtt

SEQ ID NO: 209 - DNA, 21 bp, Artificial Sequence
  Description of Artificial Sequence: Synthetic oligonucleotide
  Description of Combined DNA/RNA Molecule: Synthetic oligonucleotide
  siRNAs to PCSK9
  modified_base (1)..(1): 2'-hydroxy corresponding base
  modified_base (2)..(2): 2'-hydroxy corresponding base
  modified_base (3)..(3): 2'-hydroxy corresponding base
  modified_base (4)..(4): 2'-hydroxy corresponding base
  modified_base (5)..(5): 2'-hydroxy corresponding base
  modified_base (6)..(6): 2'-hydroxy corresponding base
  modified_base (7)..(7): 2'-hydroxy corresponding base
  modified_base (8)..(8): 2'-hydroxy corresponding base
  modified_base (9)..(9): 2'-hydroxy corresponding base
  modified_base (10)..(10): 2'-hydroxy corresponding base
  modified_base (11)..(11): 2'-hydroxy corresponding base
  modified_base (12)..(12): 2'-hydroxy corresponding base
  modified_base (13)..(13): 2'-hydroxy corresponding base
  modified_base (14)..(14): 2'-hydroxy corresponding base
  modified_base (15)..(15): 2'-hydroxy corresponding base
  modified_base (16)..(16): 2'-hydroxy corresponding base
  modified_base (17)..(17): 2'-hydroxy corresponding base
  modified_base (18)..(18): 2'-hydroxy corresponding base
  modified_base (19)..(19): 2'-hydroxy corresponding base
  modified_base (20)..(20): deoxythymidine
  modified_base (21)..(21): 5'-thio thymidine
ccugguggagguguaucuctt

SEQ ID NO: 210 - DNA, 21 bp, Artificial Sequence
  Description of Artificial Sequence: Synthetic oligonucleotide
  Description of Combined DNA/RNA Molecule: Synthetic oligonucleotide
  siRNAs to PCSK9
  modified_base (1)..(1): 2'-hydroxy corresponding base
  modified_base (2)..(2): 2'-hydroxy corresponding base
  modified_base (3)..(3): 2'-hydroxy corresponding base
  modified_base (4)..(4): 2'-hydroxy corresponding base
  modified_base (5)..(5): 2'-hydroxy corresponding base
  modified_base (6)..(6): 2'-hydroxy corresponding base
  modified_base (7)..(7): 2'-hydroxy corresponding base
  modified_base (8)..(8): 2'-hydroxy corresponding base
  modified_base (9)..(9): 2'-hydroxy corresponding base
  modified_base (10)..(10): 2'-hydroxy corresponding base
  modified_base (11)..(11): 2'-hydroxy corresponding base
  modified_base (12)..(12): 2'-hydroxy corresponding base
  modified_base (13)..(13): 2'-hydroxy corresponding base
  modified_base (14)..(14): 2'-hydroxy corresponding base
  modified_base (15)..(15): 2'-hydroxy corresponding base
  modified_base (16)..(16): 2'-hydroxy corresponding base
  modified_base (17)..(17): 2'-hydroxy corresponding base
  modified_base (18)..(18): 2'-hydroxy corresponding base
  modified_base (19)..(19): 2'-hydroxy corresponding base
  modified_base (20)..(20): deoxythymidine
  modified_base (21)..(21): 5'-thio thymidine
gagauacaccuccaccaggtt

SEQ ID NO: 211 - DNA, 21 bp, Artificial Sequence
  Description of Artificial Sequence: Synthetic oligonucleotide
  Description of Combined DNA/RNA Molecule: Synthetic oligonucleotide
  siRNAs to PCSK9
  modified_base (1)..(1): 2'-O-methyl corresponding base
  modified_base (2)..(2): 2'-O-methyl corresponding base
  modified_base (3)..(3): 2'-O-methyl corresponding base
  modified_base (4)..(4): 2'-hydroxy corresponding base
  modified_base (5)..(5): 2'-hydroxy corresponding base
  modified_base (6)..(6): 2'-O-methyl corresponding base
  modified_base (7)..(7): 2'-hydroxy corresponding base
  modified_base (8)..(8): 2'-hydroxy corresponding base
  modified_base (9)..(9): 2'-hydroxy corresponding base
  modified_base (10)..(10): 2'-hydroxy corresponding base
  modified_base (11)..(11): 2'-hydroxy corresponding base
  modified_base (12)..(12): 2'-O-methyl corresponding base
  modified_base (13)..(13): 2'-hydroxy corresponding base
  modified_base (14)..(14): 2'-O-methyl corresponding base
  modified_base (15)..(15): 2'-hydroxy corresponding base
  modified_base (16)..(16): 2'-O-methyl corresponding base
  modified_base (17)..(17): 2'-O-methyl corresponding base
  modified_base (18)..(18): 2'-O-methyl corresponding base
  modified_base (19)..(19): 2'-O-methyl corresponding base
  modified_base (20)..(20): deoxythymidine
  modified_base (21)..(21): 5'-thio thymidine
ccugguggagguguaucuctt

SEQ ID NO: 212 - DNA, 21 bp, Artificial Sequence
  Description of Artificial Sequence: Synthetic oligonucleotide
  Description of Combined DNA/RNA Molecule: Synthetic oligonucleotide
  siRNAs to PCSK9
  modified_base (1)..(1): 2'-hydroxy corresponding base
  modified_base (2)..(2): 2'-hydroxy corresponding base
  modified_base (3)..(3): 2'-hydroxy corresponding base
  modified_base (4)..(4): 2'-hydroxy corresponding base
  modified_base (5)..(5): 2'-O-methyl corresponding base
  modified_base (6)..(6): 2'-hydroxy corresponding base
  modified_base (7)..(7): 2'-O-methyl corresponding base
  modified_base (8)..(8): 2'-hydroxy corresponding base
  modified_base (9)..(9): 2'-hydroxy corresponding base
  modified_base (10)..(10): 2'-hydroxy corresponding base
  modified_base (11)..(11): 2'-hydroxy corresponding base
  modified_base (12)..(12): 2'-hydroxy corresponding base
  modified_base (13)..(13): 2'-O-methyl corresponding base
  modified_base (14)..(14): 2'-hydroxy corresponding base
  modified_base (15)..(15): 2'-hydroxy corresponding base
  modified_base (16)..(16): 2'-O-methyl corresponding base
  modified_base (17)..(17): 2'-hydroxy corresponding base
  modified_base (18)..(18): 2'-hydroxy corresponding base
  modified_base (19)..(19): 2'-hydroxy corresponding base
  modified_base (20)..(20): deoxythymidine
  modified_base (21)..(21): 5'-thio thymidine
gagauacaccuccaccaggtt

SEQ ID NO: 213 - DNA, 21 bp, Artificial Sequence
  Description of Artificial Sequence: Synthetic oligonucleotide
  Description of Combined DNA/RNA Molecule: Synthetic oligonucleotide
  siRNAs to PCSK9
  modified_base (1)..(1): 2'-hydroxy corresponding base
  modified_base (2)..(2): 2'-hydroxy corresponding base
  modified_base (3)..(3): 2'-hydroxy corresponding base
  modified_base (4)..(4): 2'-hydroxy corresponding base
  modified_base (5)..(5): 2'-hydroxy corresponding base
  modified_base (6)..(6): 2'-hydroxy corresponding base
  modified_base (7)..(7): 2'-hydroxy corresponding base
  modified_base (8)..(8): 2'-hydroxy corresponding base
  modified_base (9)..(9): 2'-hydroxy corresponding base
  modified_base (10)..(10): 2'-hydroxy corresponding base
  modified_base (11)..(11): 2'-hydroxy corresponding base
  modified_base (12)..(12): 2'-hydroxy corresponding base
  modified_base (13)..(13): 2'-hydroxy corresponding base
  modified_base (14)..(14): 2'-hydroxy corresponding base
  modified_base (15)..(15): 2'-hydroxy corresponding base
  modified_base (16)..(16): 2'-hydroxy corresponding base
  modified_base (17)..(17): 2'-hydroxy corresponding base
  modified_base (18)..(18): 2'-hydroxy corresponding base
  modified_base (19)..(19): 2'-hydroxy corresponding base
  modified_base (20)..(20): deoxythymidine
  modified_base (21)..(21): 5'-thio thymidine
cugguggagguguaucucctt

SEQ ID NO: 214 - DNA, 21 bp, Artificial Sequence
  Description of Artificial Sequence: Synthetic oligonucleotide
  Description of Combined DNA/RNA Molecule: Synthetic oligonucleotide
  siRNAs to PCSK9
  modified_base (1)..(1): 2'-hydroxy corresponding base
  modified_base (2)..(2): 2'-hydroxy corresponding base
  modified_base (3)..(3): 2'-hydroxy corresponding base
  modified_base (4)..(4): 2'-hydroxy corresponding base
  modified_base (5)..(5): 2'-hydroxy corresponding base
  modified_base (6)..(6): 2'-hydroxy corresponding base
  modified_base (7)..(7): 2'-hydroxy corresponding base
  modified_base (8)..(8): 2'-hydroxy corresponding base
  modified_base (9)..(9): 2'-hydroxy corresponding base
  modified_base (10)..(10): 2'-hydroxy corresponding base
  modified_base (11)..(11): 2'-hydroxy corresponding base
  modified_base (12)..(12): 2'-hydroxy corresponding base
  modified_base (13)..(13): 2'-hydroxy corresponding base
  modified_base (14)..(14): 2'-hydroxy corresponding base
  modified_base (15)..(15): 2'-hydroxy corresponding base
  modified_base (16)..(16): 2'-hydroxy corresponding base
  modified_base (17)..(17): 2'-hydroxy corresponding base
  modified_base (18)..(18): 2'-hydroxy corresponding base
  modified_base (19)..(19): 2'-hydroxy corresponding base
  modified_base (20)..(20): deoxythymidine
  modified_base (21)..(21): 5'-thio thymidine
ggagauacaccuccaccagtt

SEQ ID NO: 215 - DNA, 21 bp, Artificial Sequence
  Description of Artificial Sequence: Synthetic oligonucleotide
  Description of Combined DNA/RNA Molecule: Synthetic oligonucleotide
  siRNAs to PCSK9
  modified_base (1)..(1): 2'-O-methyl corresponding base
  modified_base (2)..(2): 2'-O-methyl corresponding base
  modified_base (3)..(3): 2'-hydroxy corresponding base
  modified_base (4)..(4): 2'-hydroxy corresponding base
  modified_base (5)..(5): 2'-O-methyl corresponding base
  modified_base (6)..(6): 2'-hydroxy corresponding base
  modified_base (7)..(7): 2'-hydroxy corresponding base
  modified_base (8)..(8): 2'-hydroxy corresponding base
  modified_base (9)..(9): 2'-hydroxy corresponding base
  modified_base (10)..(10): 2'-hydroxy corresponding base
  modified_base (11)..(11): 2'-O-methyl corresponding base
  modified_base (12)..(12): 2'-hydroxy corresponding base
  modified_base (13)..(13): 2'-O-methyl corresponding base
  modified_base (14)..(14): 2'-hydroxy corresponding base
  modified_base (15)..(15): 2'-O-methyl corresponding base
  modified_base (16)..(16): 2'-O-methyl corresponding base
  modified_base (17)..(17): 2'-O-methyl corresponding base
  modified_base (18)..(18): 2'-O-methyl corresponding base
  modified_base (19)..(19): 2'-O-methyl corresponding base
  modified_base (20)..(20): deoxythymidine
  modified_base (21)..(21): 5'-thio thymidine
cugguggagguguaucucctt

SEQ ID NO: 216 - DNA, 21 bp, Artificial Sequence
  Description of Artificial Sequence: Synthetic oligonucleotide
  Description of Combined DNA/RNA Molecule: Synthetic oligonucleotide
  siRNAs to PCSK9
  modified_base (1)..(1): 2'-hydroxy corresponding base
  modified_base (2)..(2): 2'-hydroxy corresponding base
  modified_base (3)..(3): 2'-hydroxy corresponding base
  modified_base (4)..(4): 2'-hydroxy corresponding base
  modified_base (5)..(5): 2'-hydroxy corresponding base
  modified_base (6)..(6): 2'-O-methyl corresponding base
  modified_base (7)..(7): 2'-hydroxy corresponding base
  modified_base (8)..(8): 2'-O-methyl corresponding base
  modified_base (9)..(9): 2'-hydroxy corresponding base
  modified_base (10)..(10): 2'-hydroxy corresponding base
  modified_base (11)..(11): 2'-hydroxy corresponding base
  modified_base (12)..(12): 2'-hydroxy corresponding base
  modified_base (13)..(13): 2'-hydroxy corresponding base
  modified_base (14)..(14): 2'-O-methyl corresponding base
  modified_base (15)..(15): 2'-hydroxy corresponding base
  modified_base (16)..(16): 2'-hydroxy corresponding base
  modified_base (17)..(17): 2'-O-methyl corresponding base
  modified_base (18)..(18): 2'-hydroxy corresponding base
  modified_base (19)..(19): 2'-hydroxy corresponding base
  modified_base (20)..(20): deoxythymidine
  modified_base (21)..(21): 5'-thio thymidine
ggagauacaccuccaccagtt

SEQ ID NO: 217 - DNA, 21 bp, Artificial Sequence
  Description of Artificial Sequence: Synthetic oligonucleotide
  Description of Combined DNA/RNA Molecule: Synthetic oligonucleotide
  siRNAs to PCSK9
  modified_base (1)..(1): 2'-hydroxy corresponding base
  modified_base (2)..(2): 2'-hydroxy corresponding base
  modified_base (3)..(3): 2'-hydroxy corresponding base
  modified_base (4)..(4): 2'-hydroxy corresponding base
  modified_base (5)..(5): 2'-hydroxy corresponding base
  modified_base (6)..(6): 2'-hydroxy corresponding base
  modified_base (7)..(7): 2'-hydroxy corresponding base
  modified_base (8)..(8): 2'-hydroxy corresponding base
  modified_base (9)..(9): 2'-hydroxy corresponding base
  modified_base (10)..(10): 2'-hydroxy corresponding base
  modified_base (11)..(11): 2'-hydroxy corresponding base
  modified_base (12)..(12): 2'-hydroxy corresponding base
  modified_base (13)..(13): 2'-hydroxy corresponding base
  modified_base (14)..(14): 2'-hydroxy corresponding base
  modified_base (15)..(15): 2'-hydroxy corresponding base
  modified_base (16)..(16): 2'-hydroxy corresponding base
  modified_base (17)..(17): 2'-hydroxy corresponding base
  modified_base (18)..(18): 2'-hydroxy corresponding base
  modified_base (19)..(19): 2'-hydroxy corresponding base
  modified_base (20)..(20): deoxythymidine
  modified_base (21)..(21): 5'-thio thymidine
ugguggagguguaucuccutt

SEQ ID NO: 218 - DNA, 21 bp, Artificial Sequence
  Description of Artificial Sequence: Synthetic oligonucleotide
  Description of Combined DNA/RNA Molecule: Synthetic oligonucleotide
  siRNAs to PCSK9
  modified_base (1)..(1): 2'-hydroxy corresponding base
  modified_base (2)..(2): 2'-hydroxy corresponding base
  modified_base (3)..(3): 2'-hydroxy corresponding base
  modified_base (4)..(4): 2'-hydroxy corresponding base
  modified_base (5)..(5): 2'-hydroxy corresponding base
  modified_base (6)..(6): 2'-hydroxy corresponding base
  modified_base (7)..(7): 2'-hydroxy corresponding base
  modified_base (8)..(8): 2'-hydroxy corresponding base
  modified_base (9)..(9): 2'-hydroxy corresponding base
  modified_base (10)..(10): 2'-hydroxy corresponding base
  modified_base (11)..(11): 2'-hydroxy corresponding base
  modified_base (12)..(12): 2'-hydroxy corresponding base
  modified_base (13)..(13): 2'-hydroxy corresponding base
  modified_base (14)..(14): 2'-hydroxy corresponding base
  modified_base (15)..(15): 2'-hydroxy corresponding base
  modified_base (16)..(16): 2'-hydroxy corresponding base
  modified_base (17)..(17): 2'-hydroxy corresponding base
  modified_base (18)..(18): 2'-hydroxy corresponding base
  modified_base (19)..(19): 2'-hydroxy corresponding base
  modified_base (20)..(20): deoxythymidine
  modified_base (21)..(21): 5'-thio thymidine
aggagauacaccuccaccatt

SEQ ID NO: 219 - DNA, 21 bp, Artificial Sequence
  Description of Artificial Sequence: Synthetic oligonucleotide
  Description of Combined DNA/RNA Molecule: Synthetic oligonucleotide
  siRNAs to PCSK9
  modified_base (1)..(1): 2'-O-methyl corresponding base
  modified_base (2)..(2): 2'-hydroxy corresponding base
  modified_base (3)..(3): 2'-hydroxy corresponding base
  modified_base (4)..(4): 2'-O-methyl corresponding base
  modified_base (5)..(5): 2'-hydroxy corresponding base
  modified_base (6)..(6): 2'-hydroxy corresponding base
  modified_base (7)..(7): 2'-hydroxy corresponding base
  modified_base (8)..(8): 2'-hydroxy corresponding base
  modified_base (9)..(9): 2'-hydroxy corresponding base
  modified_base (10)..(10): 2'-O-methyl corresponding base
  modified_base (11)..(11): 2'-hydroxy corresponding base
  modified_base (12)..(12): 2'-O-methyl corresponding base
  modified_base (13)..(13): 2'-hydroxy corresponding base
  modified_base (14)..(14): 2'-O-methyl corresponding base
  modified_base (15)..(15): 2'-O-methyl corresponding base
  modified_base (16)..(16): 2'-O-methyl corresponding base
  modified_base (17)..(17): 2'-O-methyl corresponding base
  modified_base (18)..(18): 2'-O-methyl corresponding base
  modified_base (19)..(19): 2'-O-methyl corresponding base
  modified_base (20)..(20): deoxythymidine
  modified_base (21)..(21): 5'-thio thymidine
ugguggagguguaucuccutt

SEQ ID NO: 220 - DNA, 21 bp, Artificial Sequence
  Description of Artificial Sequence: Synthetic oligonucleotide
  Description of Combined DNA/RNA Molecule: Synthetic oligonucleotide
  siRNAs to PCSK9
  modified_base (1)..(1): 2'-hydroxy corresponding base
  modified_base (2)..(2): 2'-hydroxy corresponding base
  modified_base (3)..(3): 2'-hydroxy corresponding base
  modified_base (4)..(4): 2'-hydroxy corresponding base
  modified_base (5)..(5): 2'-hydroxy corresponding base
  modified_base (6)..(6): 2'-hydroxy corresponding base
  modified_base (7)..(7): 2'-O-methyl corresponding base
  modified_base (8)..(8): 2'-hydroxy corresponding base
  modified_base (9)..(9): 2'-O-methyl corresponding base
  modified_base (10)..(10): 2'-hydroxy corresponding base
  modified_base (11)..(11): 2'-hydroxy corresponding base
  modified_base (12)..(12): 2'-hydroxy corresponding base
  modified_base (13)..(13): 2'-hydroxy corresponding base
  modified_base (14)..(14): 2'-hydroxy corresponding base
  modified_base (15)..(15): 2'-O-methyl corresponding base
  modified_base (16)..(16): 2'-hydroxy corresponding base
  modified_base (17)..(17): 2'-hydroxy corresponding base
  modified_base (18)..(18): 2'-O-methyl corresponding base
  modified_base (19)..(19): 2'-hydroxy corresponding base
  modified_base (20)..(20): deoxythymidine
  modified_base (21)..(21): 5'-thio thymidine
aggagauacaccuccaccatt

SEQ ID NO: 221 - DNA, 21 bp, Artificial Sequence
  Description of Artificial Sequence: Synthetic oligonucleotide
  Description of Combined DNA/RNA Molecule: Synthetic oligonucleotide
  siRNAs to PCSK9
  modified_base (1)..(1): 2'-hydroxy corresponding base
  modified_base (2)..(2): 2'-hydroxy corresponding base
  modified_base (3)..(3): 2'-hydroxy corresponding base
  modified_base (4)..(4): 2'-hydroxy corresponding base
  modified_base (5)..(5): 2'-hydroxy corresponding base
  modified_base (6)..(6): 2'-hydroxy corresponding base
  modified_base (7)..(7): 2'-hydroxy corresponding base
  modified_base (8)..(8): 2'-hydroxy corresponding base
  modified_base (9)..(9): 2'-hydroxy corresponding base
  modified_base (10)..(10): 2'-hydroxy corresponding base
  modified_base (11)..(11): 2'-hydroxy corresponding base
  modified_base (12)..(12): 2'-hydroxy corresponding base
  modified_base (13)..(13): 2'-hydroxy corresponding base
  modified_base (14)..(14): 2'-hydroxy corresponding base
  modified_base (15)..(15): 2'-hydroxy corresponding base
  modified_base (16)..(16): 2'-hydroxy corresponding base
  modified_base (17)..(17): 2'-hydroxy corresponding base
  modified_base (18)..(18): 2'-hydroxy corresponding base
  modified_base (19)..(19): 2'-hydroxy corresponding base
  modified_base (20)..(20): deoxythymidine
  modified_base (21)..(21): 5'-thio thymidine
gguggagguguaucuccuatt

SEQ ID NO: 222 - DNA, 21 bp, Artificial Sequence
  Description of Artificial Sequence: Synthetic oligonucleotide
  Description of Combined DNA/RNA Molecule: Synthetic oligonucleotide
  siRNAs to PCSK9
  modified_base (1)..(1): 2'-hydroxy corresponding base
  modified_base (2)..(2): 2'-hydroxy corresponding base
  modified_base (3)..(3): 2'-hydroxy corresponding base
  modified_base (4)..(4): 2'-hydroxy corresponding base
  modified_base (5)..(5): 2'-hydroxy corresponding base
  modified_base (6)..(6): 2'-hydroxy corresponding base
  modified_base (7)..(7): 2'-hydroxy corresponding base
  modified_base (8)..(8): 2'-hydroxy corresponding base
  modified_base (9)..(9): 2'-hydroxy corresponding base
  modified_base (10)..(10): 2'-hydroxy corresponding base
  modified_base (11)..(11): 2'-hydroxy corresponding base
  modified_base (12)..(12): 2'-hydroxy corresponding base
  modified_base (13)..(13): 2'-hydroxy corresponding base
  modified_base (14)..(14): 2'-hydroxy corresponding base
  modified_base (15)..(15): 2'-hydroxy corresponding base
  modified_base (16)..(16): 2'-hydroxy corresponding base
  modified_base (17)..(17): 2'-hydroxy corresponding base
  modified_base (18)..(18): 2'-hydroxy corresponding base
  modified_base (19)..(19): 2'-hydroxy corresponding base
  modified_base (20)..(20): deoxythymidine
  modified_base (21)..(21): 5'-thio thymidine
uaggagauacaccuccacctt

SEQ ID NO: 223 - DNA, 21 bp, Artificial Sequence
  Description of Artificial Sequence: Synthetic oligonucleotide
  Description of Combined DNA/RNA Molecule: Synthetic oligonucleotide
  siRNAs to PCSK9
  modified_base (1)..(1): 2'-hydroxy corresponding base
  modified_base (2)..(2): 2'-hydroxy corresponding base
  modified_base (3)..(3): 2'-O-methyl corresponding base
  modified_base (4)..(4): 2'-hydroxy corresponding base
  modified_base (5)..(5): 2'-hydroxy corresponding base
  modified_base (6)..(6): 2'-hydroxy corresponding base
  modified_base (7)..(7): 2'-hydroxy corresponding base
  modified_base (8)..(8): 2'-hydroxy corresponding base
  modified_base (9)..(9): 2'-O-methyl corresponding base
  modified_base (10)..(10): 2'-hydroxy corresponding base
  modified_base (11)..(11): 2'-O-methyl corresponding base
  modified_base (12)..(12): 2'-hydroxy corresponding base
  modified_base (13)..(13): 2'-O-methyl corresponding base
  modified_base (14)..(14): 2'-O-methyl corresponding base
  modified_base (15)..(15): 2'-O-methyl corresponding base
  modified_base (16)..(16): 2'-O-methyl corresponding base
  modified_base (17)..(17): 2'-O-methyl corresponding base
  modified_base (18)..(18): 2'-O-methyl corresponding base
  modified_base (19)..(19): 2'-hydroxy corresponding base
  modified_base (20)..(20): deoxythymidine
  modified_base (21)..(21): 5'-thio thymidine
gguggagguguaucuccuatt

SEQ ID NO: 224 - DNA, 21 bp, Artificial Sequence
  Description of Artificial Sequence: Synthetic oligonucleotide
  Description of Combined DNA/RNA Molecule: Synthetic oligonucleotide
  siRNAs to PCSK9
  modified_base (1)..(1): 2'-O-methyl corresponding base
  modified_base (2)..(2): 2'-hydroxy corresponding base
  modified_base (3)..(3): 2'-hydroxy corresponding base
  modified_base (4)..(4): 2'-hydroxy corresponding base
  modified_base (5)..(5): 2'-hydroxy corresponding base
  modified_base (6)..(6): 2'-hydroxy corresponding base
  modified_base (7)..(7): 2'-hydroxy corresponding base
  modified_base (8)..(8): 2'-O-methyl corresponding base
  modified_base (9)..(9): 2'-hydroxy corresponding base
  modified_base (10)..(10): 2'-O-methyl corresponding base
  modified_base (11)..(11): 2'-hydroxy corresponding base
  modified_base (12)..(12): 2'-hydroxy corresponding base
  modified_base (13)..(13): 2'-hydroxy corresponding base
  modified_base (14)..(14): 2'-hydroxy corresponding base
  modified_base (15)..(15): 2'-hydroxy corresponding base
  modified_base (16)..(16): 2'-O-methyl corresponding base
  modified_base (17)..(17): 2'-hydroxy corresponding base
  modified_base (18)..(18): 2'-hydroxy corresponding base
  modified_base (19)..(19): 2'-hydroxy corresponding base
  modified_base (20)..(20): deoxythymidine
  modified_base (21)..(21): 5'-thio thymidine
uaggagauacaccuccacctt

SEQ ID NO: 225 - DNA, 21 bp, Artificial Sequence
  Description of Artificial Sequence: Synthetic oligonucleotide
  Description of Combined DNA/RNA Molecule: Synthetic oligonucleotide
  siRNAs to PCSK9
  modified_base (1)..(1): 2'-hydroxy corresponding base
  modified_base (2)..(2): 2'-hydroxy corresponding base
  modified_base (3)..(3): 2'-hydroxy corresponding base
  modified_base (4)..(4): 2'-hydroxy corresponding base
  modified_base (5)..(5): 2'-hydroxy corresponding base
  modified_base (6)..(6): 2'-hydroxy corresponding base
  modified_base (7)..(7): 2'-hydroxy corresponding base
  modified_base (8)..(8): 2'-hydroxy corresponding base
  modified_base (9)..(9): 2'-hydroxy corresponding base
  modified_base (10)..(10): 2'-hydroxy corresponding base
  modified_base (11)..(11): 2'-hydroxy corresponding base
  modified_base (12)..(12): 2'-hydroxy corresponding base
  modified_base (13)..(13): 2'-hydroxy corresponding base
  modified_base (14)..(14): 2'-hydroxy corresponding base
  modified_base (15)..(15): 2'-hydroxy corresponding base
  modified_base (16)..(16): 2'-hydroxy corresponding base
  modified_base (17)..(17): 2'-hydroxy corresponding base
  modified_base (18)..(18): 2'-hydroxy corresponding base
  modified_base (19)..(19): 2'-hydroxy corresponding base
  modified_base (20)..(20): deoxythymidine
  modified_base (21)..(21): 5'-thio thymidine
ggagguguaucuccuagactt

SEQ ID NO: 226 - DNA, 21 bp, Artificial Sequence
  Description of Artificial Sequence: Synthetic oligonucleotide
  Description of Combined DNA/RNA Molecule: Synthetic oligonucleotide
  siRNAs to PCSK9
  modified_base (1)..(1): 2'-hydroxy corresponding base
  modified_base (2)..(2): 2'-hydroxy corresponding base
  modified_base (3)..(3): 2'-hydroxy corresponding base
  modified_base (4)..(4): 2'-hydroxy corresponding base
  modified_base (5)..(5): 2'-hydroxy corresponding base
  modified_base (6)..(6): 2'-hydroxy corresponding base
  modified_base (7)..(7): 2'-hydroxy corresponding base
  modified_base (8)..(8): 2'-hydroxy corresponding base
  modified_base (9)..(9): 2'-hydroxy corresponding base
  modified_base (10)..(10): 2'-hydroxy corresponding base
  modified_base (11)..(11): 2'-hydroxy corresponding base
  modified_base (12)..(12): 2'-hydroxy corresponding base
  modified_base (13)..(13): 2'-hydroxy corresponding base
  modified_base (14)..(14): 2'-hydroxy corresponding base
  modified_base (15)..(15): 2'-hydroxy corresponding base
  modified_base (16)..(16): 2'-hydroxy corresponding base
  modified_base (17)..(17): 2'-hydroxy corresponding base
  modified_base (18)..(18): 2'-hydroxy corresponding base
  modified_base (19)..(19): 2'-hydroxy corresponding base
  modified_base (20)..(20): deoxythymidine
  modified_base (21)..(21): 5'-thio thymidine
gucuaggagauacaccucctt

SEQ ID NO: 227 - DNA, 21 bp, Artificial Sequence
  Description of Artificial Sequence: Synthetic oligonucleotide
  Description of Combined DNA/RNA Molecule: Synthetic oligonucleotide
  siRNAs to PCSK9
  modified_base (1)..(1): 2'-hydroxy corresponding base
  modified_base (2)..(2): 2'-hydroxy corresponding base
  modified_base (3)..(3): 2'-hydroxy corresponding base
  modified_base (4)..(4): 2'-hydroxy corresponding base
  modified_base (5)..(5): 2'-hydroxy corresponding base
  modified_base (6)..(6): 2'-O-methyl corresponding base
  modified_base (7)..(7): 2'-hydroxy corresponding base
  modified_base (8)..(8): 2'-O-methyl corresponding base
  modified_base (9)..(9): 2'-hydroxy corresponding base
  modified_base (10)..(10): 2'-O-methyl corresponding base
  modified_base (11)..(11): 2'-O-methyl corresponding base
  modified_base (12)..(12): 2'-O-methyl corresponding base
  modified_base (13)..(13): 2'-O-methyl corresponding base
  modified_base (14)..(14): 2'-O-methyl corresponding base
  modified_base (15)..(15): 2'-O-methyl corresponding base
  modified_base (16)..(16): 2'-hydroxy corresponding base
  modified_base (17)..(17): 2'-hydroxy corresponding base
  modified_base (18)..(18): 2'-hydroxy corresponding base
  modified_base (19)..(19): 2'-O-methyl corresponding base
  modified_base (20)..(20): deoxythymidine
  modified_base (21)..(21): 5'-thio thymidine
ggagguguaucuccuagactt

SEQ ID NO: 228 - DNA, 21 bp, Artificial Sequence
  Description of Artificial Sequence: Synthetic oligonucleotide
  Description of Combined DNA/RNA Molecule: Synthetic oligonucleotide
  siRNAs to PCSK9
  modified_base (1)..(1): 2'-hydroxy corresponding base
  modified_base (2)..(2): 2'-hydroxy corresponding base
  modified_base (3)..(3): 2'-hydroxy corresponding base
  modified_base (4)..(4): 2'-O-methyl corresponding base
  modified_base (5)..(5): 2'-hydroxy corresponding base
  modified_base (6)..(6): 2'-hydroxy corresponding base
  modified_base (7)..(7): 2'-hydroxy corresponding base
  modified_base (8)..(8): 2'-hydroxy corresponding base
  modified_base (9)..(9): 2'-hydroxy corresponding base
  modified_base (10)..(10): 2'-hydroxy corresponding base
  modified_base (11)..(11): 2'-O-methyl corresponding base
  modified_base (12)..(12): 2'-hydroxy corresponding base
  modified_base (13)..(13): 2'-O-methyl corresponding base
  modified_base (14)..(14): 2'-hydroxy corresponding base
  modified_base (15)..(15): 2'-hydroxy corresponding base
  modified_base (16)..(16): 2'-hydroxy corresponding base
  modified_base (17)..(17): 2'-hydroxy corresponding base
  modified_base (18)..(18): 2'-hydroxy corresponding base
  modified_base (19)..(19): 2'-hydroxy corresponding base
  modified_base (20)..(20): deoxythymidine
  modified_base (21)..(21): 5'-thio thymidine
gucuaggagauacaccucctt

SEQ ID NO: 229 - DNA, 21 bp, Artificial Sequence
  Description of Artificial Sequence: Synthetic oligonucleotide
  Description of Combined DNA/RNA Molecule: Synthetic oligonucleotide
  siRNAs to PCSK9
  modified_base (1)..(1): 2'-hydroxy corresponding base
  modified_base (2)..(2): 2'-hydroxy corresponding base
  modified_base (3)..(3): 2'-hydroxy corresponding base
  modified_base (4)..(4): 2'-hydroxy corresponding base
  modified_base (5)..(5): 2'-hydroxy corresponding base
  modified_base (6)..(6): 2'-hydroxy corresponding base
  modified_base (7)..(7): 2'-hydroxy corresponding base
  modified_base (8)..(8): 2'-hydroxy corresponding base
  modified_base (9)..(9): 2'-hydroxy corresponding base
  modified_base (10)..(10): 2'-hydroxy corresponding base
  modified_base (11)..(11): 2'-hydroxy corresponding base
  modified_base (12)..(12): 2'-hydroxy corresponding base
  modified_base (13)..(13): 2'-hydroxy corresponding base
  modified_base (14)..(14): 2'-hydroxy corresponding base
  modified_base (15)..(15): 2'-hydroxy corresponding base
  modified_base (16)..(16): 2'-hydroxy corresponding base
  modified_base (17)..(17): 2'-hydroxy corresponding base
  modified_base (18)..(18): 2'-hydroxy corresponding base
  modified_base (19)..(19): 2'-hydroxy corresponding base
  modified_base (20)..(20): deoxythymidine
  modified_base (21)..(21): 5'-thio thymidine
agguguaucuccuagacactt

SEQ ID NO: 230 - DNA, 21 bp, Artificial Sequence
  Description of Artificial Sequence: Synthetic oligonucleotide
  Description of Combined DNA/RNA Molecule: Synthetic oligonucleotide
  siRNAs to PCSK9
  modified_base (1)..(1): 2'-hydroxy corresponding base
  modified_base (2)..(2): 2'-hydroxy corresponding base
  modified_base (3)..(3): 2'-hydroxy corresponding base
  modified_base (4)..(4): 2'-hydroxy corresponding base
  modified_base (5)..(5): 2'-hydroxy corresponding base
  modified_base (6)..(6): 2'-hydroxy corresponding base
  modified_base (7)..(7): 2'-hydroxy corresponding base
  modified_base (8)..(8): 2'-hydroxy corresponding base
  modified_base (9)..(9): 2'-hydroxy corresponding base
  modified_base (10)..(10): 2'-hydroxy corresponding base
  modified_base (11)..(11): 2'-hydroxy corresponding base
  modified_base (12)..(12): 2'-hydroxy corresponding base
  modified_base (13)..(13): 2'-hydroxy corresponding base
  modified_base (14)..(14): 2'-hydroxy corresponding base
  modified_base (15)..(15): 2'-hydroxy corresponding base
  modified_base (16)..(16): 2'-hydroxy corresponding base
  modified_base (17)..(17): 2'-hydroxy corresponding base
  modified_base (18)..(18): 2'-hydroxy corresponding base
  modified_base (19)..(19): 2'-hydroxy corresponding base
  modified_base (20)..(20): deoxythymidine
  modified_base (21)..(21): 5'-thio thymidine
gugucuaggagauacaccutt

SEQ ID NO: 231 - DNA, 21 bp, Artificial Sequence
  Description of Artificial Sequence: Synthetic oligonucleotide
  Description of Combined DNA/RNA Molecule: Synthetic oligonucleotide
  siRNAs to PCSK9
  modified_base (1)..(1): 2'-hydroxy corresponding base
  modified_base (2)..(2): 2'-hydroxy corresponding base
  modified_base (3)..(3): 2'-hydroxy corresponding base
  modified_base (4)..(4): 2'-O-methyl corresponding base
  modified_base (5)..(5): 2'-hydroxy corresponding base
  modified_base (6)..(6): 2'-O-methyl corresponding base
  modified_base (7)..(7): 2'-hydroxy corresponding base
  modified_base (8)..(8): 2'-O-methyl corresponding base
  modified_base (9)..(9): 2'-O-methyl corresponding base
  modified_base (10)..(10): 2'-O-methyl corresponding base
  modified_base (11)..(11): 2'-O-methyl corresponding base
  modified_base (12)..(12): 2'-O-methyl corresponding base
  modified_base (13)..(13): 2'-O-methyl corresponding base
  modified_base (14)..(14): 2'-hydroxy corresponding base
  modified_base (15)..(15): 2'-hydroxy corresponding base
  modified_base (16)..(16): 2'-hydroxy corresponding base
  modified_base (17)..(17): 2'-O-methyl corresponding base
  modified_base (18)..(18): 2'-hydroxy corresponding base
  modified_base (19)..(19): 2'-O-methyl corresponding base
  modified_base (20)..(20): deoxythymidine
  modified_base (21)..(21): 5'-thio thymidine
agguguaucuccuagacactt

SEQ ID NO: 232 - DNA, 21 bp, Artificial Sequence
  Description of Artificial Sequence: Synthetic oligonucleotide
  Description of Combined DNA/RNA Molecule: Synthetic oligonucleotide
  siRNAs to PCSK9
  modified_base (1)..(1): 2'-hydroxy corresponding base
  modified_base (2)..(2): 2'-hydroxy corresponding base
  modified_base (3)..(3): 2'-hydroxy corresponding base
  modified_base (4)..(4): 2'-hydroxy corresponding base
  modified_base (5)..(5): 2'-hydroxy corresponding base
  modified_base (6)..(6): 2'-O-methyl corresponding base
  modified_base (7)..(7): 2'-hydroxy corresponding base
  modified_base (8)..(8): 2'-hydroxy corresponding base
  modified_base (9)..(9): 2'-hydroxy corresponding base
  modified_base (10)..(10): 2'-hydroxy corresponding base
  modified_base (11)..(11): 2'-hydroxy corresponding base
  modified_base (12)..(12): 2'-hydroxy corresponding base
  modified_base (13)..(13): 2'-O-methyl corresponding base
  modified_base (14)..(14): 2'-hydroxy corresponding base
  modified_base (15)..(15): 2'-O-methyl corresponding base
  modified_base (16)..(16): 2'-hydroxy corresponding base
  modified_base (17)..(17): 2'-hydroxy corresponding base
  modified_base (18)..(18): 2'-hydroxy corresponding base
  modified_base (19)..(19): 2'-hydroxy corresponding base
  modified_base (20)..(20): deoxythymidine
  modified_base (21)..(21): 5'-thio thymidine
gugucuaggagauacaccutt

SEQ ID NO: 233 - DNA, 21 bp, Artificial Sequence
  Description of Artificial Sequence: Synthetic oligonucleotide
  Description of Combined DNA/RNA Molecule: Synthetic oligonucleotide
  siRNAs to PCSK9
  modified_base (1)..(1): 2'-deoxy-2'-fluoro corresponding base
  modified_base (2)..(2): 2'-O-methyl corresponding base
  modified_base (3)..(3): 2'-deoxy-2'-fluoro corresponding base
  modified_base (4)..(4): 2'-O-methyl corresponding base
  modified_base (5)..(5): 2'-deoxy-2'-fluoro corresponding base
  modified_base (6)..(6): 2'-O-methyl corresponding base
  modified_base (7)..(7): 2'-deoxy-2'-fluoro corresponding base
  modified_base (8)..(8): 2'-O-methyl corresponding base
  modified_base (9)..(9): 2'-deoxy-2'-fluoro corresponding base
  modified_base (10)..(10): 2'-O-methyl corresponding base
  modified_base (11)..(11): 2'-deoxy-2'-fluoro corresponding base
  modified_base (12)..(12): 2'-O-methyl corresponding base
  modified_base (13)..(13): 2'-deoxy-2'-fluoro corresponding base
  modified_base (14)..(14): 2'-O-methyl corresponding base
  modified_base (15)..(15): 2'-deoxy-2'-fluoro corresponding base
  modified_base (16)..(16): 2'-O-methyl corresponding base
  modified_base (17)..(17): 2'-deoxy-2'-fluoro corresponding base
  modified_base (18)..(18): 2'-O-methyl corresponding base
  modified_base (19)..(19): 2'-deoxy-2'-fluoro corresponding base
  modified_base (20)..(20): deoxythymidine
  modified_base (21)..(21): 5'-thio thymidine
agguguaucuccuagacactt

SEQ ID NO: 234 - DNA, 21 bp, Artificial Sequence
  Description of Artificial Sequence: Synthetic oligonucleotide
  Description of Combined DNA/RNA Molecule: Synthetic oligonucleotide
  siRNAs to PCSK9
  modified_base (1)..(1): 2'-O-methyl corresponding base
  modified_base (2)..(2): 2'-deoxy-2'-fluoro corresponding base
  modified_base (3)..(3): 2'-O-methyl corresponding base
  modified_base (4)..(4): 2'-deoxy-2'-fluoro corresponding base
  modified_base (5)..(5): 2'-O-methyl corresponding base
  modified_base (6)..(6): 2'-deoxy-2'-fluoro corresponding base
  modified_base (7)..(7): 2'-O-methyl corresponding base
  modified_base (8)..(8): 2'-deoxy-2'-fluoro corresponding base
  modified_base (9)..(9): 2'-O-methyl corresponding base
  modified_base (10)..(10): 2'-deoxy-2'-fluoro corresponding base
  modified_base (11)..(11): 2'-O-methyl corresponding base
  modified_base (12)..(12): 2'-deoxy-2'-fluoro corresponding base
  modified_base (13)..(13): 2'-O-methyl corresponding base
  modified_base (14)..(14): 2'-deoxy-2'-fluoro corresponding base
  modified_base (15)..(15): 2'-O-methyl corresponding base
  modified_base (16)..(16): 2'-deoxy-2'-fluoro corresponding base
  modified_base (17)..(17): 2'-O-methyl corresponding base
  modified_base (18)..(18): 2'-deoxy-2'-fluoro corresponding base
  modified_base (19)..(19): 2'-O-methyl corresponding base
  modified_base (20)..(20): deoxythymidine
  modified_base (21)..(21): 5'-thio thymidine
gugucuaggagauacaccutt

SEQ ID NO: 235 - DNA, 21 bp, Artificial Sequence
  Description of Artificial Sequence: Synthetic oligonucleotide
  Description of Combined DNA/RNA Molecule: Synthetic oligonucleotide
  siRNAs to PCSK9
  modified_base (1)..(1): 2'-hydroxy corresponding base
  modified_base (2)..(2): 2'-hydroxy corresponding base
  modified_base (3)..(3): 2'-hydroxy corresponding base
  modified_base (4)..(4): 2'-deoxy-2'-fluoro corresponding base
  modified_base (5)..(5): 2'-hydroxy corresponding base
  modified_base (6)..(6): 2'-deoxy-2'-fluoro corresponding base
  modified_base (7)..(7): 2'-hydroxy corresponding base
  modified_base (8)..(8): 2'-deoxy-2'-fluoro corresponding base
  modified_base (9)..(9): 2'-deoxy-2'-fluoro corresponding base
  modified_base (10)..(10): 2'-deoxy-2'-fluoro corresponding base
  modified_base (11)..(11): 2'-deoxy-2'-fluoro corresponding base
  modified_base (12)..(12): 2'-deoxy-2'-fluoro corresponding base
  modified_base (13)..(13): 2'-deoxy-2'-fluoro corresponding base
  modified_base (14)..(14): 2'-hydroxy corresponding base
  modified_base (15)..(15): 2'-hydroxy corresponding base
  modified_base (16)..(16): 2'-hydroxy corresponding base
  modified_base (17)..(17): 2'-deoxy-2'-fluoro corresponding base
  modified_base (18)..(18): 2'-hydroxy corresponding base
  modified_base (19)..(19): 2'-deoxy-2'-fluoro corresponding base
  modified_base (20)..(20): deoxythymidine
  modified_base (21)..(21): 5'-thio thymidine
agguguaucuccuagacactt

SEQ ID NO: 236 - DNA, 21 bp, Artificial Sequence
  Description of Artificial Sequence: Synthetic oligonucleotide
  Description of Combined DNA/RNA Molecule: Synthetic oligonucleotide
  siRNAs to PCSK9
  modified_base (1)..(1): 2'-hydroxy corresponding base
  modified_base (2)..(2): 2'-deoxy-2'-fluoro corresponding base
  modified_base (3)..(3): 2'-hydroxy corresponding base
  modified_base (4)..(4): 2'-deoxy-2'-fluoro corresponding base
  modified_base (5)..(5): 2'-deoxy-2'-fluoro corresponding base
  modified_base (6)..(6): 2'-deoxy-2'-fluoro corresponding base
  modified_base (7)..(7): 2'-hydroxy corresponding base
  modified_base (8)..(8): 2'-hydroxy corresponding base
  modified_base (9)..(9): 2'-hydroxy corresponding base
  modified_base (10)..(10): 2'-hydroxy corresponding base
  modified_base (11)..(11): 2'-hydroxy corresponding base
  modified_base (12)..(12): 2'-hydroxy corresponding base
  modified_base (13)..(13): 2'-deoxy-2'-fluoro corresponding base
  modified_base (14)..(14): 2'-hydroxy corresponding base
  modified_base (15)..(15): 2'-deoxy-2'-fluoro corresponding base
  modified_base (16)..(16): 2'-hydroxy corresponding base
  modified_base (17)..(17): 2'-deoxy-2'-fluoro corresponding base
  modified_base (18)..(18): 2'-deoxy-2'-fluoro corresponding base
  modified_base (19)..(19): 2'-deoxy-2'-fluoro corresponding base
  modified_base (20)..(20): deoxythymidine
  modified_base (21)..(21): 5'-thio thymidine
gugucuaggagauacaccutt

SEQ ID NO: 237 - DNA, 21 bp, Artificial Sequence
  Description of Artificial Sequence: Synthetic oligonucleotide
  Description of Combined DNA/RNA Molecule: Synthetic oligonucleotide
  siRNAs to PCSK9
  modified_base (1)..(1): 2'-hydroxy corresponding base
  modified_base (2)..(2): 2'-O-methyl corresponding base
  modified_base (3)..(3): 2'-hydroxy corresponding base
  modified_base (4)..(4): 2'-O-methyl corresponding base
  modified_base (5)..(5): 2'-hydroxy corresponding base
  modified_base (6)..(6): 2'-O-methyl corresponding base
  modified_base (7)..(7): 2'-hydroxy corresponding base
  modified_base (8)..(8): 2'-O-methyl corresponding base
  modified_base (9)..(9): 2'-hydroxy corresponding base
  modified_base (10)..(10): 2'-O-methyl corresponding base
  modified_base (11)..(11): 2'-hydroxy corresponding base
  modified_base (12)..(12): 2'-O-methyl corresponding base
  modified_base (13)..(13): 2'-hydroxy corresponding base
  modified_base (14)..(14): 2'-O-methyl corresponding base
  modified_base (15)..(15): 2'-hydroxy corresponding base
  modified_base (16)..(16): 2'-O-methyl corresponding base
  modified_base (17)..(17): 2'-hydroxy corresponding base
  modified_base (18)..(18): 2'-O-methyl corresponding base
  modified_base (19)..(19): 2'-hydroxy corresponding base
  modified_base (20)..(20): deoxythymidine
  modified_base (21)..(21): 5'-thio thymidine
agguguaucuccuagacactt

SEQ ID NO: 238 - DNA, 21 bp, Artificial Sequence
  Description of Artificial Sequence: Synthetic oligonucleotide
  Description of Combined DNA/RNA Molecule: Synthetic oligonucleotide
  siRNAs to PCSK9
  modified_base (1)..(1): 2'-O-methyl corresponding base
  modified_base (2)..(2): 2'-deoxy-2'-fluoro corresponding base
  modified_base (3)..(3): 2'-O-methyl corresponding base
  modified_base (4)..(4): 2'-deoxy-2'-fluoro corresponding base
  modified_base (5)..(5): 2'-O-methyl corresponding base
  modified_base (6)..(6): 2'-deoxy-2'-fluoro corresponding base
  modified_base (7)..(7): 2'-O-methyl corresponding base
  modified_base (8)..(8): 2'-deoxy-2'-fluoro corresponding base
  modified_base (9)..(9): 2'-O-methyl corresponding base
  modified_base (10)..(10): 2'-deoxy-2'-fluoro corresponding base
  modified_base (11)..(11): 2'-O-methyl corresponding base
  modified_base (12)..(12): 2'-deoxy-2'-fluoro corresponding base
  modified_base (13)..(13): 2'-O-methyl corresponding base
  modified_base (14)..(14): 2'-deoxy-2'-fluoro corresponding base
  modified_base (15)..(15): 2'-O-methyl corresponding base
  modified_base (16)..(16): 2'-deoxy-2'-fluoro corresponding base
  modified_base (17)..(17): 2'-O-methyl corresponding base
  modified_base (18)..(18): 2'-deoxy-2'-fluoro corresponding base
  modified_base (19)..(19): 2'-O-methyl corresponding base
  modified_base (20)..(20): deoxythymidine
  modified_base (21)..(21): 5'-thio thymidine
gugucuaggagauacaccutt

SEQ ID NO: 239 - DNA, 21 bp, Artificial Sequence
  Description of Artificial Sequence: Synthetic oligonucleotide
  Description of Combined DNA/RNA Molecule: Synthetic oligonucleotide
  siRNAs to PCSK9
  modified_base (1)..(1): 2'-hydroxy corresponding base
  modified_base (2)..(2): 2'-O-methyl corresponding base
  modified_base (3)..(3): 2'-hydroxy corresponding base
  modified_base (4)..(4): 2'-O-methyl corresponding base
  modified_base (5)..(5): 2'-hydroxy corresponding base
  modified_base (6)..(6): 2'-O-methyl corresponding base
  modified_base (7)..(7): 2'-hydroxy corresponding base
  modified_base (8)..(8): 2'-O-methyl corresponding base
  modified_base (9)..(9): 2'-hydroxy corresponding base
  modified_base (10)..(10): 2'-O-methyl corresponding base
  modified_base (11)..(11): 2'-hydroxy corresponding base
  modified_base (12)..(12): 2'-O-methyl corresponding base
  modified_base (13)..(13): 2'-hydroxy corresponding base
  modified_base (14)..(14): 2'-O-methyl corresponding base
  modified_base (15)..(15): 2'-hydroxy corresponding base
  modified_base (16)..(16): 2'-O-methyl corresponding base
  modified_base (17)..(17): 2'-hydroxy corresponding base
  modified_base (18)..(18): 2'-O-methyl corresponding base
  modified_base (19)..(19): 2'-hydroxy corresponding base
  modified_base (20)..(20): deoxythymidine
  modified_base (21)..(21): 5'-thio thymidine
agguguaucuccuagacactt

SEQ ID NO: 240 - DNA, 21 bp, Artificial Sequence
  Description of Artificial Sequence: Synthetic oligonucleotide
  Description of Combined DNA/RNA Molecule: Synthetic oligonucleotide
  siRNAs to PCSK9
  modified_base (1)..(1): 2'-hydroxy corresponding base
  modified_base (2)..(2): 2'-deoxy-2'-fluoro corresponding base
  modified_base (3)..(3): 2'-hydroxy corresponding base
  modified_base (4)..(4): 2'-deoxy-2'-fluoro corresponding base
  modified_base (5)..(5): 2'-deoxy-2'-fluoro corresponding base
  modified_base (6)..(6): 2'-deoxy-2'-fluoro corresponding base
  modified_base (7)..(7): 2'-hydroxy corresponding base
  modified_base (8)..(8): 2'-hydroxy corresponding base
  modified_base (9)..(9): 2'-hydroxy corresponding base
  modified_base (10)..(10): 2'-hydroxy corresponding base
  modified_base (11)..(11): 2'-hydroxy corresponding base
  modified_base (12)..(12): 2'-hydroxy corresponding base
  modified_base (13)..(13): 2'-deoxy-2'-fluoro corresponding base
  modified_base (14)..(14): 2'-hydroxy corresponding base
  modified_base (15)..(15): 2'-deoxy-2'-fluoro corresponding base
  modified_base (16)..(16): 2'-hydroxy corresponding base
  modified_base (17)..(17): 2'-deoxy-2'-fluoro corresponding base
  modified_base (18)..(18): 2'-deoxy-2'-fluoro corresponding base
  modified_base (19)..(19): 2'-deoxy-2'-fluoro corresponding base
  modified_base (20)..(20): deoxythymidine
  modified_base (21)..(21): 5'-thio thymidine
gugucuaggagauacaccutt

SEQ ID NO: 241 - DNA, 21 bp, Artificial Sequence
  Description of Artificial Sequence: Synthetic oligonucleotide
  Description of Combined DNA/RNA Molecule: Synthetic oligonucleotide
  siRNAs to PCSK9
  modified_base (1)..(1): 2'-deoxy-2'-fluoro corresponding base
  modified_base (2)..(2): 2'-O-methyl corresponding base
  modified_base (3)..(3): 2'-deoxy-2'-fluoro corresponding base
  modified_base (4)..(4): 2'-O-methyl corresponding base
  modified_base (5)..(5): 2'-deoxy-2'-fluoro corresponding base
  modified_base (6)..(6): 2'-O-methyl corresponding base
  modified_base (7)..(7): 2'-deoxy-2'-fluoro corresponding base
  modified_base (8)..(8): 2'-O-methyl corresponding base
  modified_base (9)..(9): 2'-deoxy-2'-fluoro corresponding base
  modified_base (10)..(10): 2'-O-methyl corresponding base
  modified_base (11)..(11): 2'-deoxy-2'-fluoro corresponding base
  modified_base (12)..(12): 2'-O-methyl corresponding base
  modified_base (13)..(13): 2'-deoxy-2'-fluoro corresponding base
  modified_base (14)..(14): 2'-O-methyl corresponding base
  modified_base (15)..(15): 2'-deoxy-2'-fluoro corresponding base
  modified_base (16)..(16): 2'-O-methyl corresponding base
  modified_base (17)..(17): 2'-deoxy-2'-fluoro corresponding base
  modified_base (18)..(18): 2'-O-methyl corresponding base
  modified_base (19)..(19): 2'-deoxy-2'-fluoro corresponding base
  modified_base (20)..(20): deoxythymidine
  modified_base (21)..(21): 5'-thio thymidine
agguguaucuccuagacactt

SEQ ID NO: 242 - DNA, 21 bp, Artificial Sequence
  Description of Artificial Sequence: Synthetic oligonucleotide
  Description of Combined DNA/RNA Molecule: Synthetic oligonucleotide
  siRNAs to PCSK9
  modified_base (1)..(1): 2'-hydroxy corresponding base
  modified_base (2)..(2): 2'-hydroxy corresponding base
  modified_base (3)..(3): 2'-hydroxy corresponding base
  modified_base (4)..(4): 2'-hydroxy corresponding base
  modified_base (5)..(5): 2'-hydroxy corresponding base
  modified_base (6)..(6): 2'-O-methyl corresponding base
  modified_base (7)..(7): 2'-O-methyl corresponding base
  modified_base (8)..(8): 2'-hydroxy corresponding base
  modified_base (9)..(9): 2'-hydroxy corresponding base
  modified_base (10)..(10): 2'-O-methyl corresponding base
  modified_base (11)..(11): 2'-O-methyl corresponding base
  modified_base (12)..(12): 2'-hydroxy corresponding base
  modified_base (13)..(13): 2'-hydroxy corresponding base
  modified_base (14)..(14): 2'-hydroxy corresponding base
  modified_base (15)..(15): 2'-hydroxy corresponding base
  modified_base (16)..(16): 2'-hydroxy corresponding base
  modified_base (17)..(17): 2'-O-methyl corresponding base
  modified_base (18)..(18): 2'-O-methyl corresponding base
  modified_base (19)..(19): 2'-O-methyl corresponding base
  modified_base (20)..(20): deoxythymidine
  modified_base (21)..(21): 5'-thio thymidine
gugucuaggagauacaccutt

SEQ ID NO: 243 - DNA, 21 bp, Artificial Sequence
  Description of Artificial Sequence: Synthetic oligonucleotide
  Description of Combined DNA/RNA Molecule: Synthetic oligonucleotide
  siRNAs to PCSK9
  modified_base (1)..(1): 2'-hydroxy corresponding base
  modified_base (2)..(2): 2'-hydroxy corresponding base
  modified_base (3)..(3): 2'-hydroxy corresponding base
  modified_base (4)..(4): 2'-deoxy-2'-fluoro corresponding base
  modified_base (5)..(5): 2'-hydroxy corresponding base
  modified_base (6)..(6): 2'-deoxy-2'-fluoro corresponding base
  modified_base (7)..(7): 2'-hydroxy corresponding base
  modified_base (8)..(8): 2'-deoxy-2'-fluoro corresponding base
  modified_base (9)..(9): 2'-deoxy-2'-fluoro corresponding base
  modified_base (10)..(10): 2'-deoxy-2'-fluoro corresponding base
  modified_base (11)..(11): 2'-deoxy-2'-fluoro corresponding base
  modified_base (12)..(12): 2'-deoxy-2'-fluoro corresponding base
  modified_base (13)..(13): 2'-deoxy-2'-fluoro corresponding base
  modified_base (14)..(14): 2'-hydroxy corresponding base
  modified_base (15)..(15): 2'-hydroxy corresponding base
  modified_base (16)..(16): 2'-hydroxy corresponding base
  modified_base (17)..(17): 2'-deoxy-2'-fluoro corresponding base
  modified_base (18)..(18): 2'-hydroxy corresponding base
  modified_base (19)..(19): 2'-deoxy-2'-fluoro corresponding base
  modified_base (20)..(20): deoxythymidine
  modified_base (21)..(21): 5'-thio thymidine
agguguaucuccuagacactt

SEQ ID NO: 244 - DNA, 21 bp, Artificial Sequence
  Description of Artificial Sequence: Synthetic oligonucleotide
  Description of Combined DNA/RNA Molecule: Synthetic oligonucleotide
  siRNAs to PCSK9
  modified_base (1)..(1): 2'-hydroxy corresponding base
  modified_base (2)..(2): 2'-hydroxy corresponding base
  modified_base (3)..(3): 2'-hydroxy corresponding base
  modified_base (4)..(4): 2'-hydroxy corresponding base
  modified_base (5)..(5): 2'-hydroxy corresponding base
  modified_base (6)..(6): 2'-O-methyl corresponding base
  modified_base (7)..(7): 2'-O-methyl corresponding base
  modified_base (8)..(8): 2'-hydroxy corresponding base
  modified_base (9)..(9): 2'-hydroxy corresponding base
  modified_base (10)..(10): 2'-O-methyl corresponding base
  modified_base (11)..(11): 2'-O-methyl corresponding base
  modified_base (12)..(12): 2'-hydroxy corresponding base
  modified_base (13)..(13): 2'-hydroxy corresponding base
  modified_base (14)..(14): 2'-hydroxy corresponding base
  modified_base (15)..(15): 2'-hydroxy corresponding base
  modified_base (16)..(16): 2'-hydroxy corresponding base
  modified_base (17)..(17): 2'-O-methyl corresponding base
  modified_base (18)..(18): 2'-O-methyl corresponding base
  modified_base (19)..(19): 2'-O-methyl corresponding base
  modified_base (20)..(20): deoxythymidine
  modified_base (21)..(21): 5'-thio thymidine
gugucuaggagauacaccutt

SEQ ID NO: 245 - DNA, 21 bp, Artificial Sequence
  Description of Artificial Sequence: Synthetic oligonucleotide
  Description of Combined DNA/RNA Molecule: Synthetic oligonucleotide
  siRNAs to PCSK9
  modified_base (1)..(1): 2'-hydroxy corresponding base
  modified_base (2)..(2): 2'-O-methyl corresponding base
  modified_base (3)..(3): 2'-hydroxy corresponding base
  modified_base (4)..(4): 2'-O-methyl corresponding base
  modified_base (5)..(5): 2'-hydroxy corresponding base
  modified_base (6)..(6): 2'-O-methyl corresponding base
  modified_base (7)..(7): 2'-hydroxy corresponding base
  modified_base (8)..(8): 2'-O-methyl corresponding base
  modified_base (9)..(9): 2'-hydroxy corresponding base
  modified_base (10)..(10): 2'-O-methyl corresponding base
  modified_base (11)..(11): 2'-hydroxy corresponding base
  modified_base (12)..(12): 2'-O-methyl corresponding base
  modified_base (13)..(13): 2'-hydroxy corresponding base
  modified_base (14)..(14): 2'-O-methyl corresponding base
  modified_base (15)..(15): 2'-hydroxy corresponding base
  modified_base (16)..(16): 2'-O-methyl corresponding base
  modified_base (17)..(17): 2'-hydroxy corresponding base
  modified_base (18)..(18): 2'-O-methyl corresponding base
  modified_base (19)..(19): 2'-hydroxy corresponding base
  modified_base (20)..(20): deoxythymidine
  modified_base (21)..(21): 5'-thio thymidine
agguguaucuccuagacactt

SEQ ID NO: 246 - DNA, 21 bp, Artificial Sequence
  Description of Artificial Sequence: Synthetic oligonucleotide
  Description of Combined DNA/RNA Molecule: Synthetic oligonucleotide
  siRNAs to PCSK9
  modified_base (1)..(1): 2'-hydroxy corresponding base
  modified_base (2)..(2): 2'-hydroxy corresponding base
  modified_base (3)..(3): 2'-hydroxy corresponding base
  modified_base (4)..(4): 2'-hydroxy corresponding base
  modified_base (5)..(5): 2'-hydroxy corresponding base
  modified_base (6)..(6): 2'-O-methyl corresponding base
  modified_base (7)..(7): 2'-O-methyl corresponding base
  modified_base (8)..(8): 2'-hydroxy corresponding base
  modified_base (9)..(9): 2'-hydroxy corresponding base
  modified_base (10)..(10): 2'-O-methyl corresponding base
  modified_base (11)..(11): 2'-O-methyl corresponding base
  modified_base (12)..(12): 2'-hydroxy corresponding base
  modified_base (13)..(13): 2'-hydroxy corresponding base
  modified_base (14)..(14): 2'-hydroxy corresponding base
  modified_base (15)..(15): 2'-hydroxy corresponding base
  modified_base (16)..(16): 2'-hydroxy corresponding base
  modified_base (17)..(17): 2'-O-methyl corresponding base
  modified_base (18)..(18): 2'-O-methyl corresponding base
  modified_base (19)..(19): 2'-O-methyl corresponding base
  modified_base (20)..(20): deoxythymidine
  modified_base (21)..(21): 5'-thio thymidine
gugucuaggagauacaccutt

SEQ ID NO: 247 - DNA, 21 bp, Artificial Sequence
  Description of Artificial Sequence: Synthetic oligonucleotide
  Description of Combined DNA/RNA Molecule: Synthetic oligonucleotide
  siRNAs to PCSK9
  modified_base (1)..(1): 2'-deoxy-2'-fluoro corresponding base
  modified_base (2)..(2): 2'-O-methyl corresponding base
  modified_base (3)..(3): 2'-deoxy-2'-fluoro corresponding base
  modified_base (4)..(4): 2'-O-methyl corresponding base
  modified_base (5)..(5): 2'-deoxy-2'-fluoro corresponding base
  modified_base (6)..(6): 2'-O-methyl corresponding base
  modified_base (7)..(7): 2'-deoxy-2'-fluoro corresponding base
  modified_base (8)..(8): 2'-O-methyl corresponding base
  modified_base (9)..(9): 2'-deoxy-2'-fluoro corresponding base
  modified_base (10)..(10): 2'-O-methyl corresponding base
  modified_base (11)..(11): 2'-deoxy-2'-fluoro corresponding base
  modified_base (12)..(12): 2'-O-methyl corresponding base
  modified_base (13)..(13): 2'-deoxy-2'-fluoro corresponding base
  modified_base (14)..(14): 2'-O-methyl corresponding base
  modified_base (15)..(15): 2'-deoxy-2'-fluoro corresponding base
  modified_base (16)..(16): 2'-O-methyl corresponding base
  modified_base (17)..(17): 2'-deoxy-2'-fluoro corresponding base
  modified_base (18)..(18): 2'-O-methyl corresponding base
  modified_base (19)..(19): 2'-deoxy-2'-fluoro corresponding base
  modified_base (20)..(20): deoxythymidine
  modified_base (21)..(21): 5'-thio thymidine
gcacccucauaggccuggatt

SEQ ID NO: 248 - DNA, 21 bp, Artificial Sequence
  Description of Artificial Sequence: Synthetic oligonucleotide
  Description of Combined DNA/RNA Molecule: Synthetic oligonucleotide
  siRNAs to PCSK9
  modified_base (1)..(1): 2'-O-methyl corresponding base
  modified_base (2)..(2): 2'-deoxy-2'-fluoro corresponding base
  modified_base (3)..(3): 2'-O-methyl corresponding base
  modified_base (4)..(4): 2'-deoxy-2'-fluoro corresponding base
  modified_base (5)..(5): 2'-O-methyl corresponding base
  modified_base (6)..(6): 2'-deoxy-2'-fluoro corresponding base
  modified_base (7)..(7): 2'-O-methyl corresponding base
  modified_base (8)..(8): 2'-deoxy-2'-fluoro corresponding base
  modified_base (9)..(9): 2'-O-methyl corresponding base
  modified_base (10)..(10): 2'-deoxy-2'-fluoro corresponding base
  modified_base (11)..(11): 2'-O-methyl corresponding base
  modified_base (12)..(12): 2'-deoxy-2'-fluoro corresponding base
  modified_base (13)..(13): 2'-O-methyl corresponding base
  modified_base (14)..(14): 2'-deoxy-2'-fluoro corresponding base
  modified_base (15)..(15): 2'-O-methyl corresponding base
  modified_base (16)..(16): 2'-deoxy-2'-fluoro corresponding base
  modified_base (17)..(17): 2'-O-methyl corresponding base
  modified_base (18)..(18): 2'-deoxy-2'-fluoro corresponding base
  modified_base (19)..(19): 2'-O-methyl corresponding base
  modified_base (20)..(20): deoxythymidine
  modified_base (21)..(21): 5'-thio thymidine
uccaggccuaugagggugctt

SEQ ID NO: 249 - DNA, 21 bp, Artificial Sequence
  Description of Artificial Sequence: Synthetic oligonucleotide
  Description of Combined DNA/RNA Molecule: Synthetic oligonucleotide
  siRNAs to PCSK9
  modified_base (1)..(1): 2'-hydroxy corresponding base
  modified_base (2)..(2): 2'-deoxy-2'-fluoro corresponding base
  modified_base (3)..(3): 2'-hydroxy corresponding base
  modified_base (4)..(4): 2'-deoxy-2'-fluoro corresponding base
  modified_base (5)..(5): 2'-deoxy-2'-fluoro corresponding base
  modified_base (6)..(6): 2'-deoxy-2'-fluoro corresponding base
  modified_base (7)..(7): 2'-deoxy-2'-fluoro corresponding base
  modified_base (8)..(8): 2'-deoxy-2'-fluoro corresponding base
  modified_base (9)..(9): 2'-hydroxy corresponding base
  modified_base (10)..(10): 2'-deoxy-2'-fluoro corresponding base
  modified_base (11)..(11): 2'-hydroxy corresponding base
  modified_base (12)..(12): 2'-hydroxy corresponding base
  modified_base (13)..(13): 2'-hydroxy corresponding base
  modified_base (14)..(14): 2'-deoxy-2'-fluoro corresponding base
  modified_base (15)..(15): 2'-deoxy-2'-fluoro corresponding base
  modified_base (16)..(16): 2'-deoxy-2'-fluoro corresponding base
  modified_base (17)..(17): 2'-hydroxy corresponding base
  modified_base (18)..(18): 2'-hydroxy corresponding base
  modified_base (19)..(19): 2'-hydroxy corresponding base
  modified_base (20)..(20): deoxythymidine
  modified_base (21)..(21): 5'-thio thymidine
gcacccucauaggccuggatt

SEQ ID NO: 250 - DNA, 21 bp, Artificial Sequence
  Description of Artificial Sequence: Synthetic oligonucleotide
  Description of Combined DNA/RNA Molecule: Synthetic oligonucleotide
  siRNAs to PCSK9
  modified_base (1)..(1): 2'-deoxy-2'-fluoro corresponding base
  modified_base (2)..(2): 2'-deoxy-2'-fluoro corresponding base
  modified_base (3)..(3): 2'-deoxy-2'-fluoro corresponding base
  modified_base (4)..(4): 2'-hydroxy corresponding base
  modified_base (5)..(5): 2'-hydroxy corresponding base
  modified_base (6)..(6): 2'-hydroxy corresponding base
  modified_base (7)..(7): 2'-deoxy-2'-fluoro corresponding base
  modified_base (8)..(8): 2'-deoxy-2'-fluoro corresponding base
  modified_base (9)..(9): 2'-deoxy-2'-fluoro corresponding base
  modified_base (10)..(10): 2'-hydroxy corresponding base
  modified_base (11)..(11): 2'-deoxy-2'-fluoro corresponding base
  modified_base (12)..(12): 2'-hydroxy corresponding base
  modified_base (13)..(13): 2'-hydroxy corresponding base
  modified_base (14)..(14): 2'-hydroxy corresponding base
  modified_base (15)..(15): 2'-hydroxy corresponding base
  modified_base (16)..(16): 2'-hydroxy corresponding base
  modified_base (17)..(17): 2'-deoxy-2'-fluoro corresponding base
  modified_base (18)..(18): 2'-hydroxy corresponding base
  modified_base (19)..(19): 2'-deoxy-2'-fluoro corresponding base
  modified_base (20)..(20): deoxythymidine
  modified_base (21)..(21): 5'-thio thymidine
uccaggccuaugagggugctt

SEQ ID NO: 251 - DNA, 21 bp, Artificial Sequence
  Description of Artificial Sequence: Synthetic oligonucleotide
  Description of Combined DNA/RNA Molecule: Synthetic oligonucleotide
  siRNAs to PCSK9
  modified_base (1)..(1): 2'-hydroxy corresponding base
  modified_base (2)..(2): 2'-O-methyl corresponding base
  modified_base (3)..(3): 2'-hydroxy corresponding base
  modified_base (4)..(4): 2'-O-methyl corresponding base
  modified_base (5)..(5): 2'-hydroxy corresponding base
  modified_base (6)..(6): 2'-O-methyl corresponding base
  modified_base (7)..(7): 2'-hydroxy corresponding base
  modified_base (8)..(8): 2'-O-methyl corresponding base
  modified_base (9)..(9): 2'-hydroxy corresponding base
  modified_base (10)..(10): 2'-O-methyl corresponding base
  modified_base (11)..(11): 2'-hydroxy corresponding base
  modified_base (12)..(12): 2'-O-methyl corresponding base
  modified_base (13)..(13): 2'-hydroxy corresponding base
  modified_base (14)..(14): 2'-O-methyl corresponding base
  modified_base (15)..(15): 2'-hydroxy corresponding base
  modified_base (16)..(16): 2'-O-methyl corresponding base
  modified_base (17)..(17): 2'-hydroxy corresponding base
  modified_base (18)..(18): 2'-O-methyl corresponding base
  modified_base (19)..(19): 2'-hydroxy corresponding base
  modified_base (20)..(20): deoxythymidine
  modified_base (21)..(21): 5'-thio thymidine
gcacccucauaggccuggatt

SEQ ID NO: 252 - DNA, 21 bp, Artificial Sequence
  Description of Artificial Sequence: Synthetic oligonucleotide
  Description of Combined DNA/RNA Molecule: Synthetic oligonucleotide
  siRNAs to PCSK9
  modified_base (1)..(1): 2'-O-methyl corresponding base
  modified_base (2)..(2): 2'-deoxy-2'-fluoro corresponding base
  modified_base (3)..(3): 2'-O-methyl corresponding base
  modified_base (4)..(4): 2'-deoxy-2'-fluoro corresponding base
  modified_base (5)..(5): 2'-O-methyl corresponding base
  modified_base (6)..(6): 2'-deoxy-2'-fluoro corresponding base
  modified_base (7)..(7): 2'-O-methyl corresponding base
  modified_base (8)..(8): 2'-deoxy-2'-fluoro corresponding base
  modified_base (9)..(9): 2'-O-methyl corresponding base
  modified_base (10)..(10): 2'-deoxy-2'-fluoro corresponding base
  modified_base (11)..(11): 2'-O-methyl corresponding base
  modified_base (12)..(12): 2'-deoxy-2'-fluoro corresponding base
  modified_base (13)..(13): 2'-O-methyl corresponding base
  modified_base (14)..(14): 2'-deoxy-2'-fluoro corresponding base
  modified_base (15)..(15): 2'-O-methyl corresponding base
  modified_base (16)..(16): 2'-deoxy-2'-fluoro corresponding base
  modified_base (17)..(17): 2'-O-methyl corresponding base
  modified_base (18)..(18): 2'-deoxy-2'-fluoro corresponding base
  modified_base (19)..(19): 2'-O-methyl corresponding base
  modified_base (20)..(20): deoxythymidine
  modified_base (21)..(21): 5'-thio thymidine
uccaggccuaugagggugctt

SEQ ID NO: 253 - DNA, 21 bp, Artificial Sequence
  Description of Artificial Sequence: Synthetic oligonucleotide
  Description of Combined DNA/RNA Molecule: Synthetic oligonucleotide
  siRNAs to PCSK9
  modified_base (1)..(1): 2'-hydroxy corresponding base
  modified_base (2)..(2): 2'-O-methyl corresponding base
  modified_base (3)..(3): 2'-hydroxy corresponding base
  modified_base (4)..(4): 2'-O-methyl corresponding base
  modified_base (5)..(5): 2'-hydroxy corresponding base
  modified_base (6)..(6): 2'-O-methyl corresponding base
  modified_base (7)..(7): 2'-hydroxy corresponding base
  modified_base (8)..(8): 2'-O-methyl corresponding base
  modified_base (9)..(9): 2'-hydroxy corresponding base
  modified_base (10)..(10): 2'-O-methyl corresponding base
  modified_base (11)..(11): 2'-hydroxy corresponding base
  modified_base (12)..(12): 2'-O-methyl corresponding base
  modified_base (13)..(13): 2'-hydroxy corresponding base
  modified_base (14)..(14): 2'-O-methyl corresponding base
  modified_base (15)..(15): 2'-hydroxy corresponding base
  modified_base (16)..(16): 2'-O-methyl corresponding base
  modified_base (17)..(17): 2'-hydroxy corresponding base
  modified_base (18)..(18): 2'-O-methyl corresponding base
  modified_base (19)..(19): 2'-hydroxy corresponding base
  modified_base (20)..(20): deoxythymidine
  modified_base (21)..(21): 5'-thio thymidine
gcacccucauaggccuggatt

SEQ ID NO: 254 - DNA, 21 bp, Artificial Sequence
  Description of Artificial Sequence: Synthetic oligonucleotide
  Description of Combined DNA/RNA Molecule: Synthetic oligonucleotide
  siRNAs to PCSK9
  modified_base (1)..(1): 2'-deoxy-2'-fluoro corresponding base
  modified_base (2)..(2): 2'-deoxy-2'-fluoro corresponding base
  modified_base (3)..(3): 2'-deoxy-2'-fluoro corresponding base
  modified_base (4)..(4): 2'-hydroxy corresponding base
  modified_base (5)..(5): 2'-hydroxy corresponding base
  modified_base (6)..(6): 2'-hydroxy corresponding base
  modified_base (7)..(7): 2'-deoxy-2'-fluoro corresponding base
  modified_base (8)..(8): 2'-deoxy-2'-fluoro corresponding base
  modified_base (9)..(9): 2'-deoxy-2'-fluoro corresponding base
  modified_base (10)..(10): 2'-hydroxy corresponding base
  modified_base (11)..(11): 2'-deoxy-2'-fluoro corresponding base
  modified_base (12)..(12): 2'-hydroxy corresponding base
  modified_base (13)..(13): 2'-hydroxy corresponding base
  modified_base (14)..(14): 2'-hydroxy corresponding base
  modified_base (15)..(15): 2'-hydroxy corresponding base
  modified_base (16)..(16): 2'-hydroxy corresponding base
  modified_base (17)..(17): 2'-deoxy-2'-fluoro corresponding base
  modified_base (18)..(18): 2'-hydroxy corresponding base
  modified_base (19)..(19): 2'-deoxy-2'-fluoro corresponding base
  modified_base (20)..(20): deoxythymidine
  modified_base (21)..(21): 5'-thio thymidine
uccaggccuaugagggugctt

SEQ ID NO: 255 - DNA, 21 bp, Artificial Sequence
  Description of Artificial Sequence: Synthetic oligonucleotide
  Description of Combined DNA/RNA Molecule: Synthetic oligonucleotide
  siRNAs to PCSK9
  modified_base (1)..(1): 2'-deoxy-2'-fluoro corresponding base
  modified_base (2)..(2): 2'-O-methyl corresponding base
  modified_base (3)..(3): 2'-deoxy-2'-fluoro corresponding base
  modified_base (4)..(4): 2'-O-methyl corresponding base
  modified_base (5)..(5): 2'-deoxy-2'-fluoro corresponding base
  modified_base (6)..(6): 2'-O-methyl corresponding base
  modified_base (7)..(7): 2'-deoxy-2'-fluoro corresponding base
  modified_base (8)..(8): 2'-O-methyl corresponding base
  modified_base (9)..(9): 2'-deoxy-2'-fluoro corresponding base
  modified_base (10)..(10): 2'-O-methyl corresponding base
  modified_base (11)..(11): 2'-deoxy-2'-fluoro corresponding base
  modified_base (12)..(12): 2'-O-methyl corresponding base
  modified_base (13)..(13): 2'-deoxy-2'-fluoro corresponding base
  modified_base (14)..(14): 2'-O-methyl corresponding base
  modified_base (15)..(15): 2'-deoxy-2'-fluoro corresponding base
  modified_base (16)..(16): 2'-O-methyl corresponding base
  modified_base (17)..(17): 2'-deoxy-2'-fluoro corresponding base
  modified_base (18)..(18): 2'-O-methyl corresponding base
  modified_base (19)..(19): 2'-deoxy-2'-fluoro corresponding base
  modified_base (20)..(20): deoxythymidine
  modified_base (21)..(21): 5'-thio thymidine
gcacccucauaggccuggatt

SEQ ID NO: 256 - DNA, 21 bp, Artificial Sequence
  Description of Artificial Sequence: Synthetic oligonucleotide
  Description of Combined DNA/RNA Molecule: Synthetic oligonucleotide
  siRNAs to PCSK9
  modified_base (1)..(1): 2'-hydroxy corresponding base
  modified_base (2)..(2): 2'-hydroxy corresponding base
  modified_base (3)..(3): 2'-hydroxy corresponding base
  modified_base (4)..(4): 2'-hydroxy corresponding base
  modified_base (5)..(5): 2'-hydroxy corresponding base
  modified_base (6)..(6): 2'-O-methyl corresponding base
  modified_base (7)..(7): 2'-O-methyl corresponding base
  modified_base (8)..(8): 2'-hydroxy corresponding base
  modified_base (9)..(9): 2'-hydroxy corresponding base
  modified_base (10)..(10): 2'-O-methyl corresponding base
  modified_base (11)..(11): 2'-O-methyl corresponding base
  modified_base (12)..(12): 2'-hydroxy corresponding base
  modified_base (13)..(13): 2'-hydroxy corresponding base
  modified_base (14)..(14): 2'-hydroxy corresponding base
  modified_base (15)..(15): 2'-hydroxy corresponding base
  modified_base (16)..(16): 2'-hydroxy corresponding base
  modified_base (17)..(17): 2'-O-methyl corresponding base
  modified_base (18)..(18): 2'-O-methyl corresponding base
  modified_base (19)..(19): 2'-O-methyl corresponding base
  modified_base (20)..(20): deoxythymidine
  modified_base (21)..(21): 5'-thio thymidine
uccaggccuaugagggugctt

SEQ ID NO: 257 - DNA, 21 bp, Artificial Sequence
  Description of Artificial Sequence: Synthetic oligonucleotide
  Description of Combined DNA/RNA Molecule: Synthetic oligonucleotide
  siRNAs to PCSK9
  modified_base (1)..(1): 2'-hydroxy corresponding base
  modified_base (2)..(2): 2'-deoxy-2'-fluoro corresponding base
  modified_base (3)..(3): 2'-hydroxy corresponding base
  modified_base (4)..(4): 2'-deoxy-2'-fluoro corresponding base
  modified_base (5)..(5): 2'-deoxy-2'-fluoro corresponding base
  modified_base (6)..(6): 2'-deoxy-2'-fluoro corresponding base
  modified_base (7)..(7): 2'-deoxy-2'-fluoro corresponding base
  modified_base (8)..(8): 2'-deoxy-2'-fluoro corresponding base
  modified_base (9)..(9): 2'-hydroxy corresponding base
  modified_base (10)..(10): 2'-deoxy-2'-fluoro corresponding base
  modified_base (11)..(11): 2'-hydroxy corresponding base
  modified_base (12)..(12): 2'-hydroxy corresponding base
  modified_base (13)..(13): 2'-hydroxy corresponding base
  modified_base (14)..(14): 2'-deoxy-2'-fluoro corresponding base
  modified_base (15)..(15): 2'-deoxy-2'-fluoro corresponding base
  modified_base (16)..(16): 2'-deoxy-2'-fluoro corresponding base
  modified_base (17)..(17): 2'-hydroxy corresponding base
  modified_base (18)..(18): 2'-hydroxy corresponding base
  modified_base (19)..(19): 2'-hydroxy corresponding base
  modified_base (20)..(20): deoxythymidine
  modified_base (21)..(21): 5'-thio thymidine
gcacccucauaggccuggatt

SEQ ID NO: 258 - DNA, 21 bp, Artificial Sequence
  Description of Artificial Sequence: Synthetic oligonucleotide
  Description of Combined DNA/RNA Molecule: Synthetic oligonucleotide
  siRNAs to PCSK9
  modified_base (1)..(1): 2'-hydroxy corresponding base
  modified_base (2)..(2): 2'-hydroxy corresponding base
  modified_base (3)..(3): 2'-hydroxy corresponding base
  modified_base (4)..(4): 2'-hydroxy corresponding base
  modified_base (5)..(5): 2'-hydroxy corresponding base
  modified_base (6)..(6): 2'-O-methyl corresponding base
  modified_base (7)..(7): 2'-O-methyl corresponding base
  modified_base (8)..(8): 2'-hydroxy corresponding base
  modified_base (9)..(9): 2'-hydroxy corresponding base
  modified_base (10)..(10): 2'-O-methyl corresponding base
  modified_base (11)..(11): 2'-O-methyl corresponding base
  modified_base (12)..(12): 2'-hydroxy corresponding base
  modified_base (13)..(13): 2'-hydroxy corresponding base
  modified_base (14)..(14): 2'-hydroxy corresponding base
  modified_base (15)..(15): 2'-hydroxy corresponding base
  modified_base (16)..(16): 2'-hydroxy corresponding base
  modified_base (17)..(17): 2'-O-methyl corresponding base
  modified_base (18)..(18): 2'-O-methyl corresponding base
  modified_base (19)..(19): 2'-O-methyl corresponding base
  modified_base (20)..(20): deoxythymidine
  modified_base (21)..(21): 5'-thio thymidine
uccaggccuaugagggugctt

SEQ ID NO: 259 - DNA, 21 bp, Artificial Sequence
  Description of Artificial Sequence: Synthetic oligonucleotide
  Description of Combined DNA/RNA Molecule: Synthetic oligonucleotide
  siRNAs to PCSK9
  modified_base (1)..(1): 2'-hydroxy corresponding base
  modified_base (2)..(2): 2'-O-methyl corresponding base
  modified_base (3)..(3): 2'-hydroxy corresponding base
  modified_base (4)..(4): 2'-O-methyl corresponding base
  modified_base (5)..(5): 2'-hydroxy corresponding base
  modified_base (6)..(6): 2'-O-methyl corresponding base
  modified_base (7)..(7): 2'-hydroxy corresponding base
  modified_base (8)..(8): 2'-O-methyl corresponding base
  modified_base (9)..(9): 2'-hydroxy corresponding base
  modified_base (10)..(10): 2'-O-methyl corresponding base
  modified_base (11)..(11): 2'-hydroxy corresponding base
  modified_base (12)..(12): 2'-O-methyl corresponding base
  modified_base (13)..(13): 2'-hydroxy corresponding base
  modified_base (14)..(14): 2'-O-methyl corresponding base
  modified_base (15)..(15): 2'-hydroxy corresponding base
  modified_base (16)..(16): 2'-O-methyl corresponding base
  modified_base (17)..(17): 2'-hydroxy corresponding base
  modified_base (18)..(18): 2'-O-methyl corresponding base
  modified_base (19)..(19): 2'-hydroxy corresponding base
  modified_base (20)..(20): deoxythymidine
  modified_base (21)..(21): 5'-thio thymidine
gcacccucauaggccuggatt

SEQ ID NO: 260 - DNA, 21 bp, Artificial Sequence
  Description of Artificial Sequence: Synthetic oligonucleotide
  Description of Combined DNA/RNA Molecule: Synthetic oligonucleotide
  siRNAs to PCSK9
  modified_base (1)..(1): 2'-hydroxy corresponding base
  modified_base (2)..(2): 2'-hydroxy corresponding base
  modified_base (3)..(3): 2'-hydroxy corresponding base
  modified_base (4)..(4): 2'-hydroxy corresponding base
  modified_base (5)..(5): 2'-hydroxy corresponding base
  modified_base (6)..(6): 2'-O-methyl corresponding base
  modified_base (7)..(7): 2'-O-methyl corresponding base
  modified_base (8)..(8): 2'-hydroxy corresponding base
  modified_base (9)..(9): 2'-hydroxy corresponding base
  modified_base (10)..(10): 2'-O-methyl corresponding base
  modified_base (11)..(11): 2'-O-methyl corresponding base
  modified_base (12)..(12): 2'-hydroxy corresponding base
  modified_base (13)..(13): 2'-hydroxy corresponding base
  modified_base (14)..(14): 2'-hydroxy corresponding base
  modified_base (15)..(15): 2'-hydroxy corresponding base
  modified_base (16)..(16): 2'-hydroxy corresponding base
  modified_base (17)..(17): 2'-O-methyl corresponding base
  modified_base (18)..(18): 2'-O-methyl corresponding base
  modified_base (19)..(19): 2'-O-methyl corresponding base
  modified_base (20)..(20): deoxythymidine
  modified_base (21)..(21): 5'-thio thymidine
uccaggccuaugagggugctt

SEQ ID NO: 261 - DNA, 21 bp, Artificial Sequence
  Description of Artificial Sequence: Synthetic oligonucleotide
  Description of Combined DNA/RNA Molecule: Synthetic oligonucleotide
  siRNAs to PCSK9
  modified_base (1)..(1): 2'-hydroxy corresponding base
  modified_base (2)..(2): 2'-hydroxy corresponding base
  modified_base (3)..(3): 2'-hydroxy corresponding base
  modified_base (4)..(4): 2'-hydroxy corresponding base
  modified_base (5)..(5): 2'-hydroxy corresponding base
  modified_base (6)..(6): 2'-hydroxy corresponding base
  modified_base (7)..(7): 2'-hydroxy corresponding base
  modified_base (8)..(8): 2'-hydroxy corresponding base
  modified_base (9)..(9): 2'-hydroxy corresponding base
  modified_base (10)..(10): 2'-hydroxy corresponding base
  modified_base (11)..(11): 2'-hydroxy corresponding base
  modified_base (12)..(12): 2'-hydroxy corresponding base
  modified_base (13)..(13): 2'-hydroxy corresponding base
  modified_base (14)..(14): 2'-hydroxy corresponding base
  modified_base (15)..(15): 2'-hydroxy corresponding base
  modified_base (16)..(16): 2'-hydroxy corresponding base
  modified_base (17)..(17): 2'-hydroxy corresponding base
  modified_base (18)..(18): 2'-hydroxy corresponding base
  modified_base (19)..(19): 2'-hydroxy corresponding base
  modified_base (20)..(20): deoxythymidine
  modified_base (21)..(21): 5'-thio thymidine
uguaucuccuagacaccagtt

SEQ ID NO: 262 - DNA, 21 bp, Artificial Sequence
  Description of Artificial Sequence: Synthetic oligonucleotide
  Description of Combined DNA/RNA Molecule: Synthetic oligonucleotide
  siRNAs to PCSK9
  modified_base (1)..(1): 2'-hydroxy corresponding base
  modified_base (2)..(2): 2'-hydroxy corresponding base
  modified_base (3)..(3): 2'-hydroxy corresponding base
  modified_base (4)..(4): 2'-hydroxy corresponding base
  modified_base (5)..(5): 2'-hydroxy corresponding base
  modified_base (6)..(6): 2'-hydroxy corresponding base
  modified_base (7)..(7): 2'-hydroxy corresponding base
  modified_base (8)..(8): 2'-hydroxy corresponding base
  modified_base (9)..(9): 2'-hydroxy corresponding base
  modified_base (10)..(10): 2'-hydroxy corresponding base
  modified_base (11)..(11): 2'-hydroxy corresponding base
  modified_base (12)..(12): 2'-hydroxy corresponding base
  modified_base (13)..(13): 2'-hydroxy corresponding base
  modified_base (14)..(14): 2'-hydroxy corresponding base
  modified_base (15)..(15): 2'-hydroxy corresponding base
  modified_base (16)..(16): 2'-hydroxy corresponding base
  modified_base (17)..(17): 2'-hydroxy corresponding base
  modified_base (18)..(18): 2'-hydroxy corresponding base
  modified_base (19)..(19): 2'-hydroxy corresponding base
  modified_base (20)..(20): deoxythymidine
  modified_base (21)..(21): 5'-thio thymidine
cuggugucuaggagauacatt

SEQ ID NO: 263 - DNA, 21 bp, Artificial Sequence
  Description of Artificial Sequence: Synthetic oligonucleotide
  Description of Combined DNA/RNA Molecule: Synthetic oligonucleotide
  siRNAs to PCSK9
  modified_base (1)..(1): 2'-O-methyl corresponding base
  modified_base (2)..(2): 2'-hydroxy corresponding base
  modified_base (3)..(3): 2'-O-methyl corresponding base
  modified_base (4)..(4): 2'-hydroxy corresponding base
  modified_base (5)..(5): 2'-O-methyl corresponding base
  modified_base (6)..(6): 2'-O-methyl corresponding base
  modified_base (7)..(7): 2'-O-methyl corresponding base
  modified_base (8)..(8): 2'-O-methyl corresponding base
  modified_base (9)..(9): 2'-O-methyl corresponding base
  modified_base (10)..(10): 2'-O-methyl corresponding base
  modified_base (11)..(11): 2'-hydroxy corresponding base
  modified_base (12)..(12): 2'-hydroxy corresponding base
  modified_base (13)..(13): 2'-hydroxy corresponding base
  modified_base (14)..(14): 2'-O-methyl corresponding base
  modified_base (15)..(15): 2'-hydroxy corresponding base
  modified_base (16)..(16): 2'-O-methyl corresponding base
  modified_base (17)..(17): 2'-O-methyl corresponding base
  modified_base (18)..(18): 2'-hydroxy corresponding base
  modified_base (19)..(19): 2'-hydroxy corresponding base
  modified_base (20)..(20): deoxythymidine
  modified_base (21)..(21): 5'-thio thymidine
uguaucuccuagacaccagtt

SEQ ID NO: 264 - DNA, 21 bp, Artificial Sequence
  Description of Artificial Sequence: Synthetic oligonucleotide
  Description of Combined DNA/RNA Molecule: Synthetic oligonucleotide
  siRNAs to PCSK9
  modified_base (1)..(1): 2'-hydroxy corresponding base
  modified_base (2)..(2): 2'-hydroxy corresponding base
  modified_base (3)..(3): 2'-hydroxy corresponding base
  modified_base (4)..(4): 2'-hydroxy corresponding base
  modified_base (5)..(5): 2'-hydroxy corresponding base
  modified_base (6)..(6): 2'-hydroxy corresponding base
  modified_base (7)..(7): 2'-hydroxy corresponding base
  modified_base (8)..(8): 2'-hydroxy corresponding base
  modified_base (9)..(9): 2'-O-methyl corresponding base
  modified_base (10)..(10): 2'-hydroxy corresponding base
  modified_base (11)..(11): 2'-hydroxy corresponding base
  modified_base (12)..(12): 2'-hydroxy corresponding base
  modified_base (13)..(13): 2'-hydroxy corresponding base
  modified_base (14)..(14): 2'-hydroxy corresponding base
  modified_base (15)..(15): 2'-hydroxy corresponding base
  modified_base (16)..(16): 2'-O-methyl corresponding base
  modified_base (17)..(17): 2'-hydroxy corresponding base
  modified_base (18)..(18): 2'-O-methyl corresponding base
  modified_base (19)..(19): 2'-hydroxy corresponding base
  modified_base (20)..(20): deoxythymidine
  modified_base (21)..(21): 5'-thio thymidine
cuggugucuaggagauacatt

SEQ ID NO: 265 - DNA, 21 bp, Artificial Sequence
  Description of Artificial Sequence: Synthetic oligonucleotide
  Description of Combined DNA/RNA Molecule: Synthetic oligonucleotide
  siRNAs to PCSK9
  modified_base (1)..(1): 2'-hydroxy corresponding base
  modified_base (2)..(2): 2'-hydroxy corresponding base
  modified_base (3)..(3): 2'-hydroxy corresponding base
  modified_base (4)..(4): 2'-hydroxy corresponding base
  modified_base (5)..(5): 2'-hydroxy corresponding base
  modified_base (6)..(6): 2'-hydroxy corresponding base
  modified_base (7)..(7): 2'-hydroxy corresponding base
  modified_base (8)..(8): 2'-hydroxy corresponding base
  modified_base (9)..(9): 2'-hydroxy corresponding base
  modified_base (10)..(10): 2'-hydroxy corresponding base
  modified_base (11)..(11): 2'-hydroxy corresponding base
  modified_base (12)..(12): 2'-hydroxy corresponding base
  modified_base (13)..(13): 2'-hydroxy corresponding base
  modified_base (14)..(14): 2'-hydroxy corresponding base
  modified_base (15)..(15): 2'-hydroxy corresponding base
  modified_base (16)..(16): 2'-hydroxy corresponding base
  modified_base (17)..(17): 2'-hydroxy corresponding base
  modified_base (18)..(18): 2'-hydroxy corresponding base
  modified_base (19)..(19): 2'-hydroxy corresponding base
  modified_base (20)..(20): deoxythymidine
  modified_base (21)..(21): 5'-thio thymidine
ucuccuagacaccagcauatt

SEQ ID NO: 266 - DNA, 21 bp, Artificial Sequence
  Description of Artificial Sequence: Synthetic oligonucleotide
  Description of Combined DNA/RNA Molecule: Synthetic oligonucleotide
  siRNAs to PCSK9
  modified_base (1)..(1): 2'-hydroxy corresponding base
  modified_base (2)..(2): 2'-hydroxy corresponding base
  modified_base (3)..(3): 2'-hydroxy corresponding base
  modified_base (4)..(4): 2'-hydroxy corresponding base
  modified_base (5)..(5): 2'-hydroxy corresponding base
  modified_base (6)..(6): 2'-hydroxy corresponding base
  modified_base (7)..(7): 2'-hydroxy corresponding base
  modified_base (8)..(8): 2'-hydroxy corresponding base
  modified_base (9)..(9): 2'-hydroxy corresponding base
  modified_base (10)..(10): 2'-hydroxy corresponding base
  modified_base (11)..(11): 2'-hydroxy corresponding base
  modified_base (12)..(12): 2'-hydroxy corresponding base
  modified_base (13)..(13): 2'-hydroxy corresponding base
  modified_base (14)..(14): 2'-hydroxy corresponding base
  modified_base (15)..(15): 2'-hydroxy corresponding base
  modified_base (16)..(16): 2'-hydroxy corresponding base
  modified_base (17)..(17): 2'-hydroxy corresponding base
  modified_base (18)..(18): 2'-hydroxy corresponding base
  modified_base (19)..(19): 2'-hydroxy corresponding base
  modified_base (20)..(20): deoxythymidine
  modified_base (21)..(21): 5'-thio thymidine
uaugcuggugucuaggagatt

SEQ ID NO: 267 - DNA, 21 bp, Artificial Sequence
  Description of Artificial Sequence: Synthetic oligonucleotide
  Description of Combined DNA/RNA Molecule: Synthetic oligonucleotide
  siRNAs to PCSK9
  modified_base (1)..(1): 2'-O-methyl corresponding base
  modified_base (2)..(2): 2'-O-methyl corresponding base
  modified_base (3)..(3): 2'-O-methyl corresponding base
  modified_base (4)..(4): 2'-O-methyl corresponding base
  modified_base (5)..(5): 2'-O-methyl corresponding base
  modified_base (6)..(6): 2'-O-methyl corresponding base
  modified_base (7)..(7): 2'-hydroxy corresponding base
  modified_base (8)..(8): 2'-hydroxy corresponding base
  modified_base (9)..(9): 2'-hydroxy corresponding base
  modified_base (10)..(10): 2'-O-methyl corresponding base
  modified_base (11)..(11): 2'-hydroxy corresponding base
  modified_base (12)..(12): 2'-O-methyl corresponding base
  modified_base (13)..(13): 2'-O-methyl corresponding base
  modified_base (14)..(14): 2'-hydroxy corresponding base
  modified_base (15)..(15): 2'-hydroxy corresponding base
  modified_base (16)..(16): 2'-O-methyl corresponding base
  modified_base (17)..(17): 2'-hydroxy corresponding base
  modified_base (18)..(18): 2'-O-methyl corresponding base
  modified_base (19)..(19): 2'-hydroxy corresponding base
  modified_base (20)..(20): deoxythymidine
  modified_base (21)..(21): 5'-thio thymidine
ucuccuagacaccagcauatt

SEQ ID NO: 268 - DNA, 21 bp, Artificial Sequence
  Description of Artificial Sequence: Synthetic oligonucleotide
  Description of Combined DNA/RNA Molecule: Synthetic oligonucleotide
  siRNAs to PCSK9
  modified_base (1)..(1): 2'-O-methyl corresponding base
  modified_base (2)..(2): 2'-hydroxy corresponding base
  modified_base (3)..(3): 2'-hydroxy corresponding base
  modified_base (4)..(4): 2'-hydroxy corresponding base
  modified_base (5)..(5): 2'-hydroxy corresponding base
  modified_base (6)..(6): 2'-hydroxy corresponding base
  modified_base (7)..(7): 2'-hydroxy corresponding base
  modified_base (8)..(8): 2'-hydroxy corresponding base
  modified_base (9)..(9): 2'-hydroxy corresponding base
  modified_base (10)..(10): 2'-hydroxy corresponding base
  modified_base (11)..(11): 2'-hydroxy corresponding base
  modified_base (12)..(12): 2'-hydroxy corresponding base
  modified_base (13)..(13): 2'-O-methyl corresponding base
  modified_base (14)..(14): 2'-hydroxy corresponding base
  modified_base (15)..(15): 2'-hydroxy corresponding base
  modified_base (16)..(16): 2'-hydroxy corresponding base
  modified_base (17)..(17): 2'-hydroxy corresponding base
  modified_base (18)..(18): 2'-hydroxy corresponding base
  modified_base (19)..(19): 2'-hydroxy corresponding base
  modified_base (20)..(20): deoxythymidine
  modified_base (21)..(21): 5'-thio thymidine
uaugcuggugucuaggagatt

SEQ ID NO: 269 - DNA, 21 bp, Artificial Sequence
  Description of Artificial Sequence: Synthetic oligonucleotide
  Description of Combined DNA/RNA Molecule: Synthetic oligonucleotide
  siRNAs to PCSK9
  modified_base (1)..(1): 2'-deoxy-2'-fluoro corresponding base
  modified_base (2)..(2): 2'-O-methyl corresponding base
  modified_base (3)..(3): 2'-deoxy-2'-fluoro corresponding base
  modified_base (4)..(4): 2'-O-methyl corresponding base
  modified_base (5)..(5): 2'-deoxy-2'-fluoro corresponding base
  modified_base (6)..(6): 2'-O-methyl corresponding base
  modified_base (7)..(7): 2'-deoxy-2'-fluoro corresponding base
  modified_base (8)..(8): 2'-O-methyl corresponding base
  modified_base (9)..(9): 2'-deoxy-2'-fluoro corresponding base
  modified_base (10)..(10): 2'-O-methyl corresponding base
  modified_base (11)..(11): 2'-deoxy-2'-fluoro corresponding base
  modified_base (12)..(12): 2'-O-methyl corresponding base
  modified_base (13)..(13): 2'-deoxy-2'-fluoro corresponding base
  modified_base (14)..(14): 2'-O-methyl corresponding base
  modified_base (15)..(15): 2'-deoxy-2'-fluoro corresponding base
  modified_base (16)..(16): 2'-O-methyl corresponding base
  modified_base (17)..(17): 2'-deoxy-2'-fluoro corresponding base
  modified_base (18)..(18): 2'-O-methyl corresponding base
  modified_base (19)..(19): 2'-deoxy-2'-fluoro corresponding base
  modified_base (20)..(20): deoxythymidine
  modified_base (21)..(21): 5'-thio thymidine
ucuccuagacaccagcauatt

SEQ ID NO: 270 - DNA, 21 bp, Artificial Sequence
  Description of Artificial Sequence: Synthetic oligonucleotide
  Description of Combined DNA/RNA Molecule: Synthetic oligonucleotide
  siRNAs to PCSK9
  modified_base (1)..(1): 2'-O-methyl corresponding base
  modified_base (2)..(2): 2'-deoxy-2'-fluoro corresponding base
  modified_base (3)..(3): 2'-O-methyl corresponding base
  modified_base (4)..(4): 2'-deoxy-2'-fluoro corresponding base
  modified_base (5)..(5): 2'-O-methyl corresponding base
  modified_base (6)..(6): 2'-deoxy-2'-fluoro corresponding base
  modified_base (7)..(7): 2'-O-methyl corresponding base
  modified_base (8)..(8): 2'-deoxy-2'-fluoro corresponding base
  modified_base (9)..(9): 2'-O-methyl corresponding base
  modified_base (10)..(10): 2'-deoxy-2'-fluoro corresponding base
  modified_base (11)..(11): 2'-O-methyl corresponding base
  modified_base (12)..(12): 2'-deoxy-2'-fluoro corresponding base
  modified_base (13)..(13): 2'-O-methyl corresponding base
  modified_base (14)..(14): 2'-deoxy-2'-fluoro corresponding base
  modified_base (15)..(15): 2'-O-methyl corresponding base
  modified_base (16)..(16): 2'-deoxy-2'-fluoro corresponding base
  modified_base (17)..(17): 2'-O-methyl corresponding base
  modified_base (18)..(18): 2'-deoxy-2'-fluoro corresponding base
  modified_base (19)..(19): 2'-O-methyl corresponding base
  modified_base (20)..(20): deoxythymidine
  modified_base (21)..(21): 5'-thio thymidine
uaugcuggugucuaggagatt

SEQ ID NO: 271 - DNA, 21 bp, Artificial Sequence
  Description of Artificial Sequence: Synthetic oligonucleotide
  Description of Combined DNA/RNA Molecule: Synthetic oligonucleotide
  siRNAs to PCSK9
  modified_base (1)..(1): 2'-deoxy-2'-fluoro corresponding base
  modified_base (2)..(2): 2'-deoxy-2'-fluoro corresponding base
  modified_base (3)..(3): 2'-deoxy-2'-fluoro corresponding base
  modified_base (4)..(4): 2'-deoxy-2'-fluoro corresponding base
  modified_base (5)..(5): 2'-deoxy-2'-fluoro corresponding base
  modified_base (6)..(6): 2'-deoxy-2'-fluoro corresponding base
  modified_base (7)..(7): 2'-hydroxy corresponding base
  modified_base (8)..(8): 2'-hydroxy corresponding base
  modified_base (9)..(9): 2'-hydroxy corresponding base
  modified_base (10)..(10): 2'-deoxy-2'-fluoro corresponding base
  modified_base (11)..(11): 2'-hydroxy corresponding base
  modified_base (12)..(12): 2'-deoxy-2'-fluoro corresponding base
  modified_base (13)..(13): 2'-deoxy-2'-fluoro corresponding base
  modified_base (14)..(14): 2'-hydroxy corresponding base
  modified_base (15)..(15): 2'-hydroxy corresponding base
  modified_base (16)..(16): 2'-deoxy-2'-fluoro corresponding base
  modified_base (17)..(17): 2'-hydroxy corresponding base
  modified_base (18)..(18): 2'-deoxy-2'-fluoro corresponding base
  modified_base (19)..(19): 2'-hydroxy corresponding base
  modified_base (20)..(20): deoxythymidine
  modified_base (21)..(21): 5'-thio thymidine
ucuccuagacaccagcauatt

SEQ ID NO: 272 - DNA, 21 bp, Artificial Sequence
  Description of Artificial Sequence: Synthetic oligonucleotide
  Description of Combined DNA/RNA Molecule: Synthetic oligonucleotide
  siRNAs to PCSK9
  modified_base (1)..(1): 2'-deoxy-2'-fluoro corresponding base
  modified_base (2)..(2): 2'-hydroxy corresponding base
  modified_base (3)..(3): 2'-deoxy-2'-fluoro corresponding base
  modified_base (4)..(4): 2'-hydroxy corresponding base
  modified_base (5)..(5): 2'-deoxy-2'-fluoro corresponding base
  modified_base (6)..(6): 2'-deoxy-2'-fluoro corresponding base
  modified_base (7)..(7): 2'-hydroxy corresponding base
  modified_base (8)..(8): 2'-hydroxy corresponding base
  modified_base (9)..(9): 2'-deoxy-2'-fluoro corresponding base
  modified_base (10)..(10): 2'-hydroxy corresponding base
  modified_base (11)..(11): 2'-deoxy-2'-fluoro corresponding base
  modified_base (12)..(12): 2'-deoxy-2'-fluoro corresponding base
  modified_base (13)..(13): 2'-deoxy-2'-fluoro corresponding base
  modified_base (14)..(14): 2'-hydroxy corresponding base
  modified_base (15)..(15): 2'-hydroxy corresponding base
  modified_base (16)..(16): 2'-hydroxy corresponding base
  modified_base (17)..(17): 2'-hydroxy corresponding base
  modified_base (18)..(18): 2'-hydroxy corresponding base
  modified_base (19)..(19): 2'-hydroxy corresponding base
  modified_base (20)..(20): deoxythymidine
  modified_base (21)..(21): 5'-thio thymidine
uaugcuggugucuaggagatt

SEQ ID NO: 273 - DNA, 21 bp, Artificial Sequence
  Description of Artificial Sequence: Synthetic oligonucleotide
  Description of Combined DNA/RNA Molecule: Synthetic oligonucleotide
  siRNAs to PCSK9
  modified_base (1)..(1): 2'-hydroxy corresponding base
  modified_base (2)..(2): 2'-O-methyl corresponding base
  modified_base (3)..(3): 2'-hydroxy corresponding base
  modified_base (4)..(4): 2'-O-methyl corresponding base
  modified_base (5)..(5): 2'-hydroxy corresponding base
  modified_base (6)..(6): 2'-O-methyl corresponding base
  modified_base (7)..(7): 2'-hydroxy corresponding base
  modified_base (8)..(8): 2'-O-methyl corresponding base
  modified_base (9)..(9): 2'-hydroxy corresponding base
  modified_base (10)..(10): 2'-O-methyl corresponding base
  modified_base (11)..(11): 2'-hydroxy corresponding base
  modified_base (12)..(12): 2'-O-methyl corresponding base
  modified_base (13)..(13): 2'-hydroxy corresponding base
  modified_base (14)..(14): 2'-O-methyl corresponding base
  modified_base (15)..(15): 2'-hydroxy corresponding base
  modified_base (16)..(16): 2'-O-methyl corresponding base
  modified_base (17)..(17): 2'-hydroxy corresponding base
  modified_base (18)..(18): 2'-O-methyl corresponding base
  modified_base (19)..(19): 2'-hydroxy corresponding base
  modified_base (20)..(20): deoxythymidine
  modified_base (21)..(21): 5'-thio thymidine
ucuccuagacaccagcauatt

SEQ ID NO: 274 - DNA, 21 bp, Artificial Sequence
  Description of Artificial Sequence: Synthetic oligonucleotide
  Description of Combined DNA/RNA Molecule: Synthetic oligonucleotide
  siRNAs to PCSK9
  modified_base (1)..(1): 2'-O-methyl corresponding base
  modified_base (2)..(2): 2'-deoxy-2'-fluoro corresponding base
  modified_base (3)..(3): 2'-O-methyl corresponding base
  modified_base (4)..(4): 2'-deoxy-2'-fluoro corresponding base
  modified_base (5)..(5): 2'-O-methyl corresponding base
  modified_base (6)..(6): 2'-deoxy-2'-fluoro corresponding base
  modified_base (7)..(7): 2'-O-methyl corresponding base
  modified_base (8)..(8): 2'-deoxy-2'-fluoro corresponding base
  modified_base (9)..(9): 2'-O-methyl corresponding base
  modified_base (10)..(10): 2'-deoxy-2'-fluoro corresponding base
  modified_base (11)..(11): 2'-O-methyl corresponding base
  modified_base (12)..(12): 2'-deoxy-2'-fluoro corresponding base
  modified_base (13)..(13): 2'-O-methyl corresponding base
  modified_base (14)..(14): 2'-deoxy-2'-fluoro corresponding base
  modified_base (15)..(15): 2'-O-methyl corresponding base
  modified_base (16)..(16): 2'-deoxy-2'-fluoro corresponding base
  modified_base (17)..(17): 2'-O-methyl corresponding base
  modified_base (18)..(18): 2'-deoxy-2'-fluoro corresponding base
  modified_base (19)..(19): 2'-O-methyl corresponding base
  modified_base (20)..(20): deoxythymidine
  modified_base (21)..(21): 5'-thio thymidine
uaugcuggugucuaggagatt

SEQ ID NO: 275 - DNA, 21 bp, Artificial Sequence
  Description of Artificial Sequence: Synthetic oligonucleotide
  Description of Combined DNA/RNA Molecule: Synthetic oligonucleotide
  siRNAs to PCSK9
  modified_base (1)..(1): 2'-hydroxy corresponding base
  modified_base (2)..(2): 2'-O-methyl corresponding base
  modified_base (3)..(3): 2'-hydroxy corresponding base
  modified_base (4)..(4): 2'-O-methyl corresponding base
  modified_base (5)..(5): 2'-hydroxy corresponding base
  modified_base (6)..(6): 2'-O-methyl corresponding base
  modified_base (7)..(7): 2'-hydroxy corresponding base
  modified_base (8)..(8): 2'-O-methyl corresponding base
  modified_base (9)..(9): 2'-hydroxy corresponding base
  modified_base (10)..(10): 2'-O-methyl corresponding base
  modified_base (11)..(11): 2'-hydroxy corresponding base
  modified_base (12)..(12): 2'-O-methyl corresponding base
  modified_base (13)..(13): 2'-hydroxy corresponding base
  modified_base (14)..(14): 2'-O-methyl corresponding base
  modified_base (15)..(15): 2'-hydroxy corresponding base
  modified_base (16)..(16): 2'-O-methyl corresponding base
  modified_base (17)..(17): 2'-hydroxy corresponding base
  modified_base (18)..(18): 2'-O-methyl corresponding base
  modified_base (19)..(19): 2'-hydroxy corresponding base
  modified_base (20)..(20): deoxythymidine
  modified_base (21)..(21): 5'-thio thymidine
ucuccuagacaccagcauatt

SEQ ID NO: 276 - DNA, 21 bp, Artificial Sequence
  Description of Artificial Sequence: Synthetic oligonucleotide
  Description of Combined DNA/RNA Molecule: Synthetic oligonucleotide
  siRNAs to PCSK9
  modified_base (1)..(1): 2'-deoxy-2'-fluoro corresponding base
  modified_base (2)..(2): 2'-hydroxy corresponding base
  modified_base (3)..(3): 2'-deoxy-2'-fluoro corresponding base
  modified_base (4)..(4): 2'-hydroxy corresponding base
  modified_base (5)..(5): 2'-deoxy-2'-fluoro corresponding base
  modified_base (6)..(6): 2'-deoxy-2'-fluoro corresponding base
  modified_base (7)..(7): 2'-hydroxy corresponding base
  modified_base (8)..(8): 2'-hydroxy corresponding base
  modified_base (9)..(9): 2'-deoxy-2'-fluoro corresponding base
  modified_base (10)..(10): 2'-hydroxy corresponding base
  modified_base (11)..(11): 2'-deoxy-2'-fluoro corresponding base
  modified_base (12)..(12): 2'-deoxy-2'-fluoro corresponding base
  modified_base (13)..(13): 2'-deoxy-2'-fluoro corresponding base
  modified_base (14)..(14): 2'-hydroxy corresponding base
  modified_base (15)..(15): 2'-hydroxy corresponding base
  modified_base (16)..(16): 2'-hydroxy corresponding base
  modified_base (17)..(17): 2'-hydroxy corresponding base
  modified_base (18)..(18): 2'-hydroxy corresponding base
  modified_base (19)..(19): 2'-hydroxy corresponding base
  modified_base (20)..(20): deoxythymidine
  modified_base (21)..(21): 5'-thio thymidine
uaugcuggugucuaggagatt

SEQ ID NO: 277 - DNA, 21 bp, Artificial Sequence
  Description of Artificial Sequence: Synthetic oligonucleotide
  Description of Combined DNA/RNA Molecule: Synthetic oligonucleotide
  siRNAs to PCSK9
  modified_base (1)..(1): 2'-deoxy-2'-fluoro corresponding base
  modified_base (2)..(2): 2'-O-methyl corresponding base
  modified_base (3)..(3): 2'-deoxy-2'-fluoro corresponding base
  modified_base (4)..(4): 2'-O-methyl corresponding base
  modified_base (5)..(5): 2'-deoxy-2'-fluoro corresponding base
  modified_base (6)..(6): 2'-O-methyl corresponding base
  modified_base (7)..(7): 2'-hydroxy corresponding base
  modified_base (8)..(8): 2'-deoxy-2'-fluoro corresponding base
  modified_base (9)..(9): 2'-deoxy-2'-fluoro corresponding base
  modified_base (10)..(10): 2'-O-methyl corresponding base
  modified_base (11)..(11): 2'-deoxy-2'-fluoro corresponding base
  modified_base (12)..(12): 2'-O-methyl corresponding base
  modified_base (13)..(13): 2'-deoxy-2'-fluoro corresponding base
  modified_base (14)..(14): 2'-O-methyl corresponding base
  modified_base (15)..(15): 2'-deoxy-2'-fluoro corresponding base
  modified_base (16)..(16): 2'-O-methyl corresponding base
  modified_base (17)..(17): 2'-deoxy-2'-fluoro corresponding base
  modified_base (18)..(18): 2'-O-methyl corresponding base
  modified_base (19)..(19): 2'-deoxy-2'-fluoro corresponding base
  modified_base (20)..(20): deoxythymidine
  modified_base (21)..(21): 5'-thio thymidine
ucuccuaaacaccagcauatt

SEQ ID NO: 278 - DNA, 21 bp, Artificial Sequence
  Description of Artificial Sequence: Synthetic oligonucleotide
  Description of Combined DNA/RNA Molecule: Synthetic oligonucleotide
  siRNAs to PCSK9
  modified_base (1)..(1): 2'-hydroxy corresponding base
  modified_base (2)..(2): 2'-hydroxy corresponding base
  modified_base (3)..(3): 2'-hydroxy corresponding base
  modified_base (4)..(4): 2'-hydroxy corresponding base
  modified_base (5)..(5): 2'-hydroxy corresponding base
  modified_base (6)..(6): 2'-O-methyl corresponding base
  modified_base (7)..(7): 2'-O-methyl corresponding base
  modified_base (8)..(8): 2'-hydroxy corresponding base
  modified_base (9)..(9): 2'-hydroxy corresponding base
  modified_base (10)..(10): 2'-O-methyl corresponding base
  modified_base (11)..(11): 2'-O-methyl corresponding base
  modified_base (12)..(12): 2'-hydroxy corresponding base
  modified_base (13)..(13): 2'-hydroxy corresponding base
  modified_base (14)..(14): 2'-hydroxy corresponding base
  modified_base (15)..(15): 2'-hydroxy corresponding base
  modified_base (16)..(16): 2'-hydroxy corresponding base
  modified_base (17)..(17): 2'-O-methyl corresponding base
  modified_base (18)..(18): 2'-O-methyl corresponding base
  modified_base (19)..(19): 2'-O-methyl corresponding base
  modified_base (20)..(20): deoxythymidine
  modified_base (21)..(21): 5'-thio thymidine
uaugcuggugucuaggagatt

SEQ ID NO: 279 - DNA, 21 bp, Artificial Sequence
  Description of Artificial Sequence: Synthetic oligonucleotide
  Description of Combined DNA/RNA Molecule: Synthetic oligonucleotide
  siRNAs to PCSK9
  modified_base (1)..(1): 2'-deoxy-2'-fluoro corresponding base
  modified_base (2)..(2): 2'-deoxy-2'-fluoro corresponding base
  modified_base (3)..(3): 2'-deoxy-2'-fluoro corresponding base
  modified_base (4)..(4): 2'-deoxy-2'-fluoro corresponding base
  modified_base (5)..(5): 2'-deoxy-2'-fluoro corresponding base
  modified_base (6)..(6): 2'-deoxy-2'-fluoro corresponding base
  modified_base (7)..(7): 2'-hydroxy corresponding base
  modified_base (8)..(8): 2'-hydroxy corresponding base
  modified_base (9)..(9): 2'-hydroxy corresponding base
  modified_base (10)..(10): 2'-deoxy-2'-fluoro corresponding base
  modified_base (11)..(11): 2'-hydroxy corresponding base
  modified_base (12)..(12): 2'-deoxy-2'-fluoro corresponding base
  modified_base (13)..(13): 2'-deoxy-2'-fluoro corresponding base
  modified_base (14)..(14): 2'-hydroxy corresponding base
  modified_base (15)..(15): 2'-hydroxy corresponding base
  modified_base (16)..(16): 2'-deoxy-2'-fluoro corresponding base
  modified_base (17)..(17): 2'-hydroxy corresponding base
  modified_base (18)..(18): 2'-deoxy-2'-fluoro corresponding base
  modified_base (19)..(19): 2'-hydroxy corresponding base
  modified_base (20)..(20): deoxythymidine
  modified_base (21)..(21): 5'-thio thymidine
ucuccuagacaccagcauatt

SEQ ID NO: 280 - DNA, 21 bp, Artificial Sequence
  Description of Artificial Sequence: Synthetic oligonucleotide
  Description of Combined DNA/RNA Molecule: Synthetic oligonucleotide
  siRNAs to PCSK9
  modified_base (1)..(1): 2'-hydroxy corresponding base
  modified_base (2)..(2): 2'-hydroxy corresponding base
  modified_base (3)..(3): 2'-hydroxy corresponding base
  modified_base (4)..(4): 2'-hydroxy corresponding base
  modified_base (5)..(5): 2'-hydroxy corresponding base
  modified_base (6)..(6): 2'-O-methyl corresponding base
  modified_base (7)..(7): 2'-O-methyl corresponding base
  modified_base (8)..(8): 2'-hydroxy corresponding base
  modified_base (9)..(9): 2'-hydroxy corresponding base
  modified_base (10)..(10): 2'-O-methyl corresponding base
  modified_base (11)..(11): 2'-O-methyl corresponding base
  modified_base (12)..(12): 2'-hydroxy corresponding base
  modified_base (13)..(13): 2'-hydroxy corresponding base
  modified_base (14)..(14): 2'-hydroxy corresponding base
  modified_base (15)..(15): 2'-hydroxy corresponding base
  modified_base (16)..(16): 2'-hydroxy corresponding base
  modified_base (17)..(17): 2'-O-methyl corresponding base
  modified_base (18)..(18): 2'-O-methyl corresponding base
  modified_base (19)..(19): 2'-O-methyl corresponding base
  modified_base (20)..(20): deoxythymidine
  modified_base (21)..(21): 5'-thio thymidine
uaugcuggugucuaggagatt

SEQ ID NO: 281 - DNA, 21 bp, Artificial Sequence
  Description of Artificial Sequence: Synthetic oligonucleotide
  Description of Combined DNA/RNA Molecule: Synthetic oligonucleotide
  siRNAs to PCSK9
  modified_base (1)..(1): 2'-hydroxy corresponding base
  modified_base (2)..(2): 2'-O-methyl corresponding base
  modified_base (3)..(3): 2'-hydroxy corresponding base
  modified_base (4)..(4): 2'-O-methyl corresponding base
  modified_base (5)..(5): 2'-hydroxy corresponding base
  modified_base (6)..(6): 2'-O-methyl corresponding base
  modified_base (7)..(7): 2'-hydroxy corresponding base
  modified_base (8)..(8): 2'-O-methyl corresponding base
  modified_base (9)..(9): 2'-hydroxy corresponding base
  modified_base (10)..(10): 2'-O-methyl corresponding base
  modified_base (11)..(11): 2'-hydroxy corresponding base
  modified_base (12)..(12): 2'-O-methyl corresponding base
  modified_base (13)..(13): 2'-hydroxy corresponding base
  modified_base (14)..(14): 2'-O-methyl corresponding base
  modified_base (15)..(15): 2'-hydroxy corresponding base
  modified_base (16)..(16): 2'-O-methyl corresponding base
  modified_base (17)..(17): 2'-hydroxy corresponding base
  modified_base (18)..(18): 2'-O-methyl corresponding base
  modified_base (19)..(19): 2'-hydroxy corresponding base
  modified_base (20)..(20): deoxythymidine
  modified_base (21)..(21): 5'-thio thymidine
ucuccuagacaccagcauatt

SEQ ID NO: 282 - DNA, 21 bp, Artificial Sequence
  Description of Artificial Sequence: Synthetic oligonucleotide
  Description of Combined DNA/RNA Molecule: Synthetic oligonucleotide
  siRNAs to PCSK9
  modified_base (1)..(1): 2'-hydroxy corresponding base
  modified_base (2)..(2): 2'-hydroxy corresponding base
  modified_base (3)..(3): 2'-hydroxy corresponding base
  modified_base (4)..(4): 2'-hydroxy corresponding base
  modified_base (5)..(5): 2'-hydroxy corresponding base
  modified_base (6)..(6): 2'-O-methyl corresponding base
  modified_base (7)..(7): 2'-O-methyl corresponding base
  modified_base (8)..(8): 2'-hydroxy corresponding base
  modified_base (9)..(9): 2'-hydroxy corresponding base
  modified_base (10)..(10): 2'-O-methyl corresponding base
  modified_base (11)..(11): 2'-O-methyl corresponding base
  modified_base (12)..(12): 2'-hydroxy corresponding base
  modified_base (13)..(13): 2'-hydroxy corresponding base
  modified_base (14)..(14): 2'-hydroxy corresponding base
  modified_base (15)..(15): 2'-hydroxy corresponding base
  modified_base (16)..(16): 2'-hydroxy corresponding base
  modified_base (17)..(17): 2'-O-methyl corresponding base
  modified_base (18)..(18): 2'-O-methyl corresponding base
  modified_base (19)..(19): 2'-O-methyl corresponding base
  modified_base (20)..(20): deoxythymidine
  modified_base (21)..(21): 5'-thio thymidine
uaugcuggugucuaggagatt

SEQ ID NO: 283 - DNA, 21 bp, Artificial Sequence
  Description of Artificial Sequence: Synthetic oligonucleotide
  Description of Combined DNA/RNA Molecule: Synthetic oligonucleotide
  siRNAs to PCSK9
  modified_base (1)..(1): 2'-deoxy-2'-fluoro corresponding base
  modified_base (2)..(2): 2'-O-methyl corresponding base
  modified_base (3)..(3): 2'-deoxy-2'-fluoro corresponding base
  modified_base (4)..(4): 2'-O-methyl corresponding base
  modified_base (5)..(5): 2'-deoxy-2'-fluoro corresponding base
  modified_base (6)..(6): 2'-O-methyl corresponding base
  modified_base (7)..(7): 2'-deoxy-2'-fluoro corresponding base
  modified_base (8)..(8): 2'-O-methyl corresponding base
  modified_base (9)..(9): 2'-deoxy-2'-fluoro corresponding base
  modified_base (10)..(10): 2'-O-methyl corresponding base
  modified_base (11)..(11): 2'-deoxy-2'-fluoro corresponding base
  modified_base (12)..(12): 2'-O-methyl corresponding base
  modified_base (13)..(13): 2'-deoxy-2'-fluoro corresponding base
  modified_base (14)..(14): 2'-O-methyl corresponding base
  modified_base (15)..(15): 2'-deoxy-2'-fluoro corresponding base
  modified_base (16)..(16): 2'-O-methyl corresponding base
  modified_base (17)..(17): 2'-deoxy-2'-fluoro corresponding base
  modified_base (18)..(18): 2'-O-methyl corresponding base
  modified_base (19)..(19): 2'-deoxy-2'-fluoro corresponding base
  modified_base (20)..(20): deoxythymidine
  modified_base (21)..(21): 5'-thio thymidine
aggccuggaguuuauucggtt

SEQ ID NO: 284 - DNA, 21 bp, Artificial Sequence
  Description of Artificial Sequence: Synthetic oligonucleotide
  Description of Combined DNA/RNA Molecule: Synthetic oligonucleotide
  siRNAs to PCSK9
  modified_base (1)..(1): 2'-O-methyl corresponding base
  modified_base (2)..(2): 2'-deoxy-2'-fluoro corresponding base
  modified_base (3)..(3): 2'-O-methyl corresponding base
  modified_base (4)..(4): 2'-deoxy-2'-fluoro corresponding base
  modified_base (5)..(5): 2'-O-methyl corresponding base
  modified_base (6)..(6): 2'-deoxy-2'-fluoro corresponding base
  modified_base (7)..(7): 2'-O-methyl corresponding base
  modified_base (8)..(8): 2'-deoxy-2'-fluoro corresponding base
  modified_base (9)..(9): 2'-O-methyl corresponding base
  modified_base (10)..(10): 2'-deoxy-2'-fluoro corresponding base
  modified_base (11)..(11): 2'-O-methyl corresponding base
  modified_base (12)..(12): 2'-deoxy-2'-fluoro corresponding base
  modified_base (13)..(13): 2'-O-methyl corresponding base
  modified_base (14)..(14): 2'-deoxy-2'-fluoro corresponding base
  modified_base (15)..(15): 2'-O-methyl corresponding base
  modified_base (16)..(16): 2'-deoxy-2'-fluoro corresponding base
  modified_base (17)..(17): 2'-O-methyl corresponding base
  modified_base (18)..(18): 2'-deoxy-2'-fluoro corresponding base
  modified_base (19)..(19): 2'-O-methyl corresponding base
  modified_base (20)..(20): deoxythymidine
  modified_base (21)..(21): 5'-thio thymidine
ccgaauaaacuccaggccutt

SEQ ID NO: 285 - DNA, 21 bp, Artificial Sequence
  Description of Artificial Sequence: Synthetic oligonucleotide
  Description of Combined DNA/RNA Molecule: Synthetic oligonucleotide
  siRNAs to PCSK9
  modified_base (1)..(1): 2'-hydroxy corresponding base
  modified_base (2)..(2): 2'-hydroxy corresponding base
  modified_base (3)..(3): 2'-hydroxy corresponding base
  modified_base (4)..(4): 2'-deoxy-2'-fluoro corresponding base
  modified_base (5)..(5): 2'-deoxy-2'-fluoro corresponding base
  modified_base (6)..(6): 2'-deoxy-2'-fluoro corresponding base
  modified_base (7)..(7): 2'-hydroxy corresponding base
  modified_base (8)..(8): 2'-hydroxy corresponding base
  modified_base (9)..(9): 2'-hydroxy corresponding base
  modified_base (10)..(10): 2'-hydroxy corresponding base
  modified_base (11)..(11): 2'-deoxy-2'-fluoro corresponding base
  modified_base (12)..(12): 2'-deoxy-2'-fluoro corresponding base
  modified_base (13)..(13): 2'-deoxy-2'-fluoro corresponding base
  modified_base (14)..(14): 2'-hydroxy corresponding base
  modified_base (15)..(15): 2'-deoxy-2'-fluoro corresponding base
  modified_base (16)..(16): 2'-deoxy-2'-fluoro corresponding base
  modified_base (17)..(17): 2'-deoxy-2'-fluoro corresponding base
  modified_base (18)..(18): 2'-hydroxy corresponding base
  modified_base (19)..(19): 2'-hydroxy corresponding base
  modified_base (20)..(20): deoxythymidine
  modified_base (21)..(21): 5'-thio thymidine
aggccuggaguuuauucggtt

SEQ ID NO: 286 - DNA, 21 bp, Artificial Sequence
  Description of Artificial Sequence: Synthetic oligonucleotide
  Description of Combined DNA/RNA Molecule: Synthetic oligonucleotide
  siRNAs to PCSK9
  modified_base (1)..(1): 2'-deoxy-2'-fluoro corresponding base
  modified_base (2)..(2): 2'-deoxy-2'-fluoro corresponding base
  modified_base (3)..(3): 2'-hydroxy corresponding base
  modified_base (4)..(4): 2'-hydroxy corresponding base
  modified_base (5)..(5): 2'-hydroxy corresponding base
  modified_base (6)..(6): 2'-deoxy-2'-fluoro corresponding base
  modified_base (7)..(7): 2'-hydroxy corresponding base
  modified_base (8)..(8): 2'-hydroxy corresponding base
  modified_base (9)..(9): 2'-hydroxy corresponding base
  modified_base (10)..(10): 2'-deoxy-2'-fluoro corresponding base
  modified_base (11)..(11): 2'-deoxy-2'-fluoro corresponding base
  modified_base (12)..(12): 2'-deoxy-2'-fluoro corresponding base
  modified_base (13)..(13): 2'-deoxy-2'-fluoro corresponding base
  modified_base (14)..(14): 2'-hydroxy corresponding base
  modified_base (15)..(15): 2'-hydroxy corresponding base
  modified_base (16)..(16): 2'-hydroxy corresponding base
  modified_base (17)..(17): 2'-deoxy-2'-fluoro corresponding base
  modified_base (18)..(18): 2'-deoxy-2'-fluoro corresponding base
  modified_base (19)..(19): 2'-deoxy-2'-fluoro corresponding base
  modified_base (20)..(20): deoxythymidine
  modified_base (21)..(21): 5'-thio thymidine
ccgaauaaacuccaggccutt

SEQ ID NO: 287 - DNA, 21 bp, Artificial Sequence
  Description of Artificial Sequence: Synthetic oligonucleotide
  Description of Combined DNA/RNA Molecule: Synthetic oligonucleotide
  siRNAs to PCSK9
  modified_base (1)..(1): 2'-hydroxy corresponding base
  modified_base (2)..(2): 2'-O-methyl corresponding base
  modified_base (3)..(3): 2'-hydroxy corresponding base
  modified_base (4)..(4): 2'-O-methyl corresponding base
  modified_base (5)..(5): 2'-hydroxy corresponding base
  modified_base (6)..(6): 2'-O-methyl corresponding base
  modified_base (7)..(7): 2'-hydroxy corresponding base
  modified_base (8)..(8): 2'-O-methyl corresponding base
  modified_base (9)..(9): 2'-hydroxy corresponding base
  modified_base (10)..(10): 2'-O-methyl corresponding base
  modified_base (11)..(11): 2'-hydroxy corresponding base
  modified_base (12)..(12): 2'-O-methyl corresponding base
  modified_base (13)..(13): 2'-hydroxy corresponding base
  modified_base (14)..(14): 2'-O-methyl corresponding base
  modified_base (15)..(15): 2'-hydroxy corresponding base
  modified_base (16)..(16): 2'-O-methyl corresponding base
  modified_base (17)..(17): 2'-hydroxy corresponding base
  modified_base (18)..(18): 2'-O-methyl corresponding base
  modified_base (19)..(19): 2'-hydroxy corresponding base
  modified_base (20)..(20): deoxythymidine
  modified_base (21)..(21): 5'-thio thymidine
aggccuggaguuuauucggtt

SEQ ID NO: 288 - DNA, 21 bp, Artificial Sequence
  Description of Artificial Sequence: Synthetic oligonucleotide
  Description of Combined DNA/RNA Molecule: Synthetic oligonucleotide
  siRNAs to PCSK9
  modified_base (1)..(1): 2'-O-methyl corresponding base
  modified_base (2)..(2): 2'-deoxy-2'-fluoro corresponding base
  modified_base (3)..(3): 2'-O-methyl corresponding base
  modified_base (4)..(4): 2'-deoxy-2'-fluoro corresponding base
  modified_base (5)..(5): 2'-O-methyl corresponding base
  modified_base (6)..(6): 2'-deoxy-2'-fluoro corresponding base
  modified_base (7)..(7): 2'-O-methyl corresponding base
  modified_base (8)..(8): 2'-deoxy-2'-fluoro corresponding base
  modified_base (9)..(9): 2'-O-methyl corresponding base
  modified_base (10)..(10): 2'-deoxy-2'-fluoro corresponding base
  modified_base (11)..(11): 2'-O-methyl corresponding base
  modified_base (12)..(12): 2'-deoxy-2'-fluoro corresponding base
  modified_base (13)..(13): 2'-O-methyl corresponding base
  modified_base (14)..(14): 2'-deoxy-2'-fluoro corresponding base
  modified_base (15)..(15): 2'-O-methyl corresponding base
  modified_base (16)..(16): 2'-deoxy-2'-fluoro corresponding base
  modified_base (17)..(17): 2'-O-methyl corresponding base
  modified_base (18)..(18): 2'-deoxy-2'-fluoro corresponding base
  modified_base (19)..(19): 2'-O-methyl corresponding base
  modified_base (20)..(20): deoxythymidine
  modified_base (21)..(21): 5'-thio thymidine
ccgaauaaacuccaggccutt

SEQ ID NO: 289 - DNA, 21 bp, Artificial Sequence
  Description of Artificial Sequence: Synthetic oligonucleotide
  Description of Combined DNA/RNA Molecule: Synthetic oligonucleotide
  siRNAs to PCSK9
  modified_base (1)..(1): 2'-hydroxy corresponding base
  modified_base (2)..(2): 2'-O-methyl corresponding base
  modified_base (3)..(3): 2'-hydroxy corresponding base
  modified_base (4)..(4): 2'-O-methyl corresponding base
  modified_base (5)..(5): 2'-hydroxy corresponding base
  modified_base (6)..(6): 2'-O-methyl corresponding base
  modified_base (7)..(7): 2'-hydroxy corresponding base
  modified_base (8)..(8): 2'-O-methyl corresponding base
  modified_base (9)..(9): 2'-hydroxy corresponding base
  modified_base (10)..(10): 2'-O-methyl corresponding base
  modified_base (11)..(11): 2'-hydroxy corresponding base
  modified_base (12)..(12): 2'-O-methyl corresponding base
  modified_base (13)..(13): 2'-hydroxy corresponding base
  modified_base (14)..(14): 2'-O-methyl corresponding base
  modified_base (15)..(15): 2'-hydroxy corresponding base
  modified_base (16)..(16): 2'-O-methyl corresponding base
  modified_base (17)..(17): 2'-hydroxy corresponding base
  modified_base (18)..(18): 2'-O-methyl corresponding base
  modified_base (19)..(19): 2'-hydroxy corresponding base
  modified_base (20)..(20): deoxythymidine
  modified_base (21)..(21): 5'-thio thymidine
aggccuggaguuuauucggtt

SEQ ID NO: 290 - DNA, 21 bp, Artificial Sequence
  Description of Artificial Sequence: Synthetic oligonucleotide
  Description of Combined DNA/RNA Molecule: Synthetic oligonucleotide
  siRNAs to PCSK9
  modified_base (1)..(1): 2'-deoxy-2'-fluoro corresponding base
  modified_base (2)..(2): 2'-deoxy-2'-fluoro corresponding base
  modified_base (3)..(3): 2'-hydroxy corresponding base
  modified_base (4)..(4): 2'-hydroxy corresponding base
  modified_base (5)..(5): 2'-hydroxy corresponding base
  modified_base (6)..(6): 2'-deoxy-2'-fluoro corresponding base
  modified_base (7)..(7): 2'-hydroxy corresponding base
  modified_base (8)..(8): 2'-hydroxy corresponding base
  modified_base (9)..(9): 2'-hydroxy corresponding base
  modified_base (10)..(10): 2'-deoxy-2'-fluoro corresponding base
  modified_base (11)..(11): 2'-deoxy-2'-fluoro corresponding base
  modified_base (12)..(12): 2'-deoxy-2'-fluoro corresponding base
  modified_base (13)..(13): 2'-deoxy-2'-fluoro corresponding base
  modified_base (14)..(14): 2'-hydroxy corresponding base
  modified_base (15)..(15): 2'-hydroxy corresponding base
  modified_base (16)..(16): 2'-hydroxy corresponding base
  modified_base (17)..(17): 2'-deoxy-2'-fluoro corresponding base
  modified_base (18)..(18): 2'-deoxy-2'-fluoro corresponding base
  modified_base (19)..(19): 2'-deoxy-2'-fluoro corresponding base
  modified_base (20)..(20): deoxythymidine
  modified_base (21)..(21): 5'-thio thymidine
ccgaauaaacuccaggccutt

SEQ ID NO: 291 - DNA, 21 bp, Artificial Sequence
  Description of Artificial Sequence: Synthetic oligonucleotide
  Description of Combined DNA/RNA Molecule: Synthetic oligonucleotide
  siRNAs to PCSK9
  modified_base (1)..(1): 2'-deoxy-2'-fluoro corresponding base
  modified_base (2)..(2): 2'-O-methyl corresponding base
  modified_base (3)..(3): 2'-deoxy-2'-fluoro corresponding base
  modified_base (4)..(4): 2'-O-methyl corresponding base
  modified_base (5)..(5): 2'-deoxy-2'-fluoro corresponding base
  modified_base (6)..(6): 2'-O-methyl corresponding base
  modified_base (7)..(7): 2'-deoxy-2'-fluoro corresponding base
  modified_base (8)..(8): 2'-O-methyl corresponding base
  modified_base (9)..(9): 2'-deoxy-2'-fluoro corresponding base
  modified_base (10)..(10): 2'-O-methyl corresponding base
  modified_base (11)..(11): 2'-deoxy-2'-fluoro corresponding base
  modified_base (12)..(12): 2'-O-methyl corresponding base
  modified_base (13)..(13): 2'-deoxy-2'-fluoro corresponding base
  modified_base (14)..(14): 2'-O-methyl corresponding base
  modified_base (15)..(15): 2'-deoxy-2'-fluoro corresponding base
  modified_base (16)..(16): 2'-O-methyl corresponding base
  modified_base (17)..(17): 2'-deoxy-2'-fluoro corresponding base
  modified_base (18)..(18): 2'-O-methyl corresponding base
  modified_base (19)..(19): 2'-deoxy-2'-fluoro corresponding base
  modified_base (20)..(20): deoxythymidine
  modified_base (21)..(21): 5'-thio thymidine
aggccuggaguuuauucggtt

SEQ ID NO: 292 - DNA, 21 bp, Artificial Sequence
  Description of Artificial Sequence: Synthetic oligonucleotide
  Description of Combined DNA/RNA Molecule: Synthetic oligonucleotide
  siRNAs to PCSK9
  modified_base (1)..(1): 2'-hydroxy corresponding base
  modified_base (2)..(2): 2'-hydroxy corresponding base
  modified_base (3)..(3): 2'-hydroxy corresponding base
  modified_base (4)..(4): 2'-hydroxy corresponding base
  modified_base (5)..(5): 2'-hydroxy corresponding base
  modified_base (6)..(6): 2'-O-methyl corresponding base
  modified_base (7)..(7): 2'-O-methyl corresponding base
  modified_base (8)..(8): 2'-hydroxy corresponding base
  modified_base (9)..(9): 2'-hydroxy corresponding base
  modified_base (10)..(10): 2'-O-methyl corresponding base
  modified_base (11)..(11): 2'-O-methyl corresponding base
  modified_base (12)..(12): 2'-hydroxy corresponding base
  modified_base (13)..(13): 2'-hydroxy corresponding base
  modified_base (14)..(14): 2'-hydroxy corresponding base
  modified_base (15)..(15): 2'-hydroxy corresponding base
  modified_base (16)..(16): 2'-hydroxy corresponding base
  modified_base (17)..(17): 2'-O-methyl corresponding base
  modified_base (18)..(18): 2'-O-methyl corresponding base
  modified_base (19)..(19): 2'-O-methyl corresponding base
  modified_base (20)..(20): deoxythymidine
  modified_base (21)..(21): 5'-thio thymidine
ccgaauaaacuccaggccutt

SEQ ID NO: 293 - DNA, 21 bp, Artificial Sequence
  Description of Artificial Sequence: Synthetic oligonucleotide
  Description of Combined DNA/RNA Molecule: Synthetic oligonucleotide
  siRNAs to PCSK9
  modified_base (1)..(1): 2'-hydroxy corresponding base
  modified_base (2)..(2): 2'-hydroxy corresponding base
  modified_base (3)..(3): 2'-hydroxy corresponding base
  modified_base (4)..(4): 2'-deoxy-2'-fluoro corresponding base
  modified_base (5)..(5): 2'-deoxy-2'-fluoro corresponding base
  modified_base (6)..(6): 2'-deoxy-2'-fluoro corresponding base
  modified_base (7)..(7): 2'-hydroxy corresponding base
  modified_base (8)..(8): 2'-hydroxy corresponding base
  modified_base (9)..(9): 2'-hydroxy corresponding base
  modified_base (10)..(10): 2'-hydroxy corresponding base
  modified_base (11)..(11): 2'-deoxy-2'-fluoro corresponding base
  modified_base (12)..(12): 2'-deoxy-2'-fluoro corresponding base
  modified_base (13)..(13): 2'-deoxy-2'-fluoro corresponding base
  modified_base (14)..(14): 2'-hydroxy corresponding base
  modified_base (15)..(15): 2'-deoxy-2'-fluoro corresponding base
  modified_base (16)..(16): 2'-deoxy-2'-fluoro corresponding base
  modified_base (17)..(17): 2'-deoxy-2'-fluoro corresponding base
  modified_base (18)..(18): 2'-hydroxy corresponding base
  modified_base (19)..(19): 2'-hydroxy corresponding base
  modified_base (20)..(20): deoxythymidine
  modified_base (21)..(21): 5'-thio thymidine
aggccuggaguuuauucggtt

SEQ ID NO: 294 - DNA, 21 bp, Artificial Sequence
  Description of Artificial Sequence: Synthetic oligonucleotide
  Description of Combined DNA/RNA Molecule: Synthetic oligonucleotide
  siRNAs to PCSK9
  modified_base (1)..(1): 2'-hydroxy corresponding base
  modified_base (2)..(2): 2'-hydroxy corresponding base
  modified_base (3)..(3): 2'-hydroxy corresponding base
  modified_base (4)..(4): 2'-hydroxy corresponding base
  modified_base (5)..(5): 2'-hydroxy corresponding base
  modified_base (6)..(6): 2'-O-methyl corresponding base
  modified_base (7)..(7): 2'-O-methyl corresponding base
  modified_base (8)..(8): 2'-hydroxy corresponding base
  modified_base (9)..(9): 2'-hydroxy corresponding base
  modified_base (10)..(10): 2'-O-methyl corresponding base
  modified_base (11)..(11): 2'-O-methyl corresponding base
  modified_base (12)..(12): 2'-hydroxy corresponding base
  modified_base (13)..(13): 2'-hydroxy corresponding base
  modified_base (14)..(14): 2'-hydroxy corresponding base
  modified_base (15)..(15): 2'-hydroxy corresponding base
  modified_base (16)..(16): 2'-hydroxy corresponding base
  modified_base (17)..(17): 2'-O-methyl corresponding base
  modified_base (18)..(18): 2'-O-methyl corresponding base
  modified_base (19)..(19): 2'-O-methyl corresponding base
  modified_base (20)..(20): deoxythymidine
  modified_base (21)..(21): 5'-thio thymidine
ccgaauaaacuccaggccutt

SEQ ID NO: 295 - DNA, 21 bp, Artificial Sequence
  Description of Artificial Sequence: Synthetic oligonucleotide
  Description of Combined DNA/RNA Molecule: Synthetic oligonucleotide
  siRNAs to PCSK9
  modified_base (1)..(1): 2'-hydroxy corresponding base
  modified_base (2)..(2): 2'-O-methyl corresponding base
  modified_base (3)..(3): 2'-hydroxy corresponding base
  modified_base (4)..(4): 2'-O-methyl corresponding base
  modified_base (5)..(5): 2'-hydroxy corresponding base
  modified_base (6)..(6): 2'-O-methyl corresponding base
  modified_base (7)..(7): 2'-hydroxy corresponding base
  modified_base (8)..(8): 2'-O-methyl corresponding base
  modified_base (9)..(9): 2'-hydroxy corresponding base
  modified_base (10)..(10): 2'-O-methyl corresponding base
  modified_base (11)..(11): 2'-hydroxy corresponding base
  modified_base (12)..(12): 2'-O-methyl corresponding base
  modified_base (13)..(13): 2'-hydroxy corresponding base
  modified_base (14)..(14): 2'-O-methyl corresponding base
  modified_base (15)..(15): 2'-hydroxy corresponding base
  modified_base (16)..(16): 2'-O-methyl corresponding base
  modified_base (17)..(17): 2'-hydroxy corresponding base
  modified_base (18)..(18): 2'-O-methyl corresponding base
  modified_base (19)..(19): 2'-hydroxy corresponding base
  modified_base (20)..(20): deoxythymidine
  modified_base (21)..(21): 5'-thio thymidine
aggccuggaguuuauucggtt

SEQ ID NO: 296 - DNA, 21 bp, Artificial Sequence
  Description of Artificial Sequence: Synthetic oligonucleotide
  Description of Combined DNA/RNA Molecule: Synthetic oligonucleotide
  siRNAs to PCSK9
  modified_base (1)..(1): 2'-hydroxy corresponding base
  modified_base (2)..(2): 2'-hydroxy corresponding base
  modified_base (3)..(3): 2'-hydroxy corresponding base
  modified_base (4)..(4): 2'-hydroxy corresponding base
  modified_base (5)..(5): 2'-hydroxy corresponding base
  modified_base (6)..(6): 2'-O-methyl corresponding base
  modified_base (7)..(7): 2'-O-methyl corresponding base
  modified_base (8)..(8): 2'-hydroxy corresponding base
  modified_base (9)..(9): 2'-hydroxy corresponding base
  modified_base (10)..(10): 2'-O-methyl corresponding base
  modified_base (11)..(11): 2'-O-methyl corresponding base
  modified_base (12)..(12): 2'-hydroxy corresponding base
  modified_base (13)..(13): 2'-hydroxy corresponding base
  modified_base (14)..(14): 2'-hydroxy corresponding base
  modified_base (15)..(15): 2'-hydroxy corresponding base
  modified_base (16)..(16): 2'-hydroxy corresponding base
  modified_base (17)..(17): 2'-O-methyl corresponding base
  modified_base (18)..(18): 2'-O-methyl corresponding base
  modified_base (19)..(19): 2'-O-methyl corresponding base
  modified_base (20)..(20): deoxythymidine
  modified_base (21)..(21): 5'-thio thymidine
ccgaauaaacuccaggccutt

SEQ ID NO: 297 - DNA, 21 bp, Artificial Sequence
  Description of Artificial Sequence: Synthetic oligonucleotide
  Description of Combined DNA/RNA Molecule: Synthetic oligonucleotide
  siRNAs to PCSK9
  modified_base (1)..(1): 2'-hydroxy corresponding base
  modified_base (2)..(2): 2'-hydroxy corresponding base
  modified_base (3)..(3): 2'-hydroxy corresponding base
  modified_base (4)..(4): 2'-hydroxy corresponding base
  modified_base (5)..(5): 2'-hydroxy corresponding base
  modified_base (6)..(6): 2'-hydroxy corresponding base
  modified_base (7)..(7): 2'-hydroxy corresponding base
  modified_base (8)..(8): 2'-hydroxy corresponding base
  modified_base (9)..(9): 2'-hydroxy corresponding base
  modified_base (10)..(10): 2'-hydroxy corresponding base
  modified_base (11)..(11): 2'-hydroxy corresponding base
  modified_base (12)..(12): 2'-hydroxy corresponding base
  modified_base (13)..(13): 2'-hydroxy corresponding base
  modified_base (14)..(14): 2'-hydroxy corresponding base
  modified_base (15)..(15): 2'-hydroxy corresponding base
  modified_base (16)..(16): 2'-hydroxy corresponding base
  modified_base (17)..(17): 2'-hydroxy corresponding base
  modified_base (18)..(18): 2'-hydroxy corresponding base
  modified_base (19)..(19): 2'-hydroxy corresponding base
  modified_base (20)..(20): deoxythymidine
  modified_base (21)..(21): 5'-thio thymidine
cuccuagacaccagcauactt

SEQ ID NO: 298 - DNA, 21 bp, Artificial Sequence
  Description of Artificial Sequence: Synthetic oligonucleotide
  Description of Combined DNA/RNA Molecule: Synthetic oligonucleotide
  siRNAs to PCSK9
  modified_base (1)..(1): 2'-hydroxy corresponding base
  modified_base (2)..(2): 2'-hydroxy corresponding base
  modified_base (3)..(3): 2'-hydroxy corresponding base
  modified_base (4)..(4): 2'-hydroxy corresponding base
  modified_base (5)..(5): 2'-hydroxy corresponding base
  modified_base (6)..(6): 2'-hydroxy corresponding base
  modified_base (7)..(7): 2'-hydroxy corresponding base
  modified_base (8)..(8): 2'-hydroxy corresponding base
  modified_base (9)..(9): 2'-hydroxy corresponding base
  modified_base (10)..(10): 2'-hydroxy corresponding base
  modified_base (11)..(11): 2'-hydroxy corresponding base
  modified_base (12)..(12): 2'-hydroxy corresponding base
  modified_base (13)..(13): 2'-hydroxy corresponding base
  modified_base (14)..(14): 2'-hydroxy corresponding base
  modified_base (15)..(15): 2'-hydroxy corresponding base
  modified_base (16)..(16): 2'-hydroxy corresponding base
  modified_base (17)..(17): 2'-hydroxy corresponding base
  modified_base (18)..(18): 2'-hydroxy corresponding base
  modified_base (19)..(19): 2'-hydroxy corresponding base
  modified_base (20)..(20): deoxythymidine
  modified_base (21)..(21): 5'-thio thymidine
guaugcuggugucuaggagtt

SEQ ID NO: 299 - DNA, 21 bp, Artificial Sequence
  Description of Artificial Sequence: Synthetic oligonucleotide
  Description of Combined DNA/RNA Molecule: Synthetic oligonucleotide
  siRNAs to PCSK9
  modified_base (1)..(1): 2'-O-methyl corresponding base
  modified_base (2)..(2): 2'-O-methyl corresponding base
  modified_base (3)..(3): 2'-O-methyl corresponding base
  modified_base (4)..(4): 2'-O-methyl corresponding base
  modified_base (5)..(5): 2'-O-methyl corresponding base
  modified_base (6)..(6): 2'-hydroxy corresponding base
  modified_base (7)..(7): 2'-hydroxy corresponding base
  modified_base (8)..(8): 2'-hydroxy corresponding base
  modified_base (9)..(9): 2'-O-methyl corresponding base
  modified_base (10)..(10): 2'-hydroxy corresponding base
  modified_base (11)..(11): 2'-O-methyl corresponding base
  modified_base (12)..(12): 2'-O-methyl corresponding base
  modified_base (13)..(13): 2'-hydroxy corresponding base
  modified_base (14)..(14): 2'-hydroxy corresponding base
  modified_base (15)..(15): 2'-O-methyl corresponding base
  modified_base (16)..(16): 2'-hydroxy corresponding base
  modified_base (17)..(17): 2'-O-methyl corresponding base
  modified_base (18)..(18): 2'-hydroxy corresponding base
  modified_base (19)..(19): 2'-O-methyl corresponding base
  modified_base (20)..(20): deoxythymidine
  modified_base (21)..(21): 5'-thio thymidine
cuccuagacaccagcauactt

SEQ ID NO: 300 - DNA, 21 bp, Artificial Sequence
  Description of Artificial Sequence: Synthetic oligonucleotide
  Description of Combined DNA/RNA Molecule: Synthetic oligonucleotide
  siRNAs to PCSK9
  modified_base (1)..(1): 2'-hydroxy corresponding base
  modified_base (2)..(2): 2'-O-methyl corresponding base
  modified_base (3)..(3): 2'-hydroxy corresponding base
  modified_base (4)..(4): 2'-hydroxy corresponding base
  modified_base (5)..(5): 2'-hydroxy corresponding base
  modified_base (6)..(6): 2'-hydroxy corresponding base
  modified_base (7)..(7): 2'-hydroxy corresponding base
  modified_base (8)..(8): 2'-hydroxy corresponding base
  modified_base (9)..(9): 2'-hydroxy corresponding base
  modified_base (10)..(10): 2'-hydroxy corresponding base
  modified_base (11)..(11): 2'-hydroxy corresponding base
  modified_base (12)..(12): 2'-hydroxy corresponding base
  modified_base (13)..(13): 2'-hydroxy corresponding base
  modified_base (14)..(14): 2'-O-methyl corresponding base
  modified_base (15)..(15): 2'-hydroxy corresponding base
  modified_base (16)..(16): 2'-hydroxy corresponding base
  modified_base (17)..(17): 2'-hydroxy corresponding base
  modified_base (18)..(18): 2'-hydroxy corresponding base
  modified_base (19)..(19): 2'-hydroxy corresponding base
  modified_base (20)..(20): deoxythymidine
  modified_base (21)..(21): 5'-thio thymidine
guaugcuggugucuaggagtt

SEQ ID NO: 301 - DNA, 21 bp, Artificial Sequence
  Description of Artificial Sequence: Synthetic oligonucleotide
  Description of Combined DNA/RNA Molecule: Synthetic oligonucleotide
  siRNAs to PCSK9
  modified_base (1)..(1): 2'-hydroxy corresponding base
  modified_base (2)..(2): 2'-hydroxy corresponding base
  modified_base (3)..(3): 2'-hydroxy corresponding base
  modified_base (4)..(4): 2'-hydroxy corresponding base
  modified_base (5)..(5): 2'-hydroxy corresponding base
  modified_base (6)..(6): 2'-hydroxy corresponding base
  modified_base (7)..(7): 2'-hydroxy corresponding base
  modified_base (8)..(8): 2'-hydroxy corresponding base
  modified_base (9)..(9): 2'-hydroxy corresponding base
  modified_base (10)..(10): 2'-hydroxy corresponding base
  modified_base (11)..(11): 2'-hydroxy corresponding base
  modified_base (12)..(12): 2'-hydroxy corresponding base
  modified_base (13)..(13): 2'-hydroxy corresponding base
  modified_base (14)..(14): 2'-hydroxy corresponding base
  modified_base (15)..(15): 2'-hydroxy corresponding base
  modified_base (16)..(16): 2'-hydroxy corresponding base
  modified_base (17)..(17): 2'-hydroxy corresponding base
  modified_base (18)..(18): 2'-hydroxy corresponding base
  modified_base (19)..(19): 2'-hydroxy corresponding base
  modified_base (20)..(20): deoxythymidine
  modified_base (21)..(21): 5'-thio thymidine
uccuagacaccagcauacatt

SEQ ID NO: 302 - DNA, 21 bp, Artificial Sequence
  Description of Artificial Sequence: Synthetic oligonucleotide
  Description of Combined DNA/RNA Molecule: Synthetic oligonucleotide
  siRNAs to PCSK9
  modified_base (1)..(1): 2'-hydroxy corresponding base
  modified_base (2)..(2): 2'-hydroxy corresponding base
  modified_base (3)..(3): 2'-hydroxy corresponding base
  modified_base (4)..(4): 2'-hydroxy corresponding base
  modified_base (5)..(5): 2'-hydroxy corresponding base
  modified_base (6)..(6): 2'-hydroxy corresponding base
  modified_base (7)..(7): 2'-hydroxy corresponding base
  modified_base (8)..(8): 2'-hydroxy corresponding base
  modified_base (9)..(9): 2'-hydroxy corresponding base
  modified_base (10)..(10): 2'-hydroxy corresponding base
  modified_base (11)..(11): 2'-hydroxy corresponding base
  modified_base (12)..(12): 2'-hydroxy corresponding base
  modified_base (13)..(13): 2'-hydroxy corresponding base
  modified_base (14)..(14): 2'-hydroxy corresponding base
  modified_base (15)..(15): 2'-hydroxy corresponding base
  modified_base (16)..(16): 2'-hydroxy corresponding base
  modified_base (17)..(17): 2'-hydroxy corresponding base
  modified_base (18)..(18): 2'-hydroxy corresponding base
  modified_base (19)..(19): 2'-hydroxy corresponding base
  modified_base (20)..(20): deoxythymidine
  modified_base (21)..(21): 5'-thio thymidine
uguaugcuggugucuaggatt

SEQ ID NO: 303 - DNA, 21 bp, Artificial Sequence
  Description of Artificial Sequence: Synthetic oligonucleotide
  Description of Combined DNA/RNA Molecule: Synthetic oligonucleotide
  siRNAs to PCSK9
  modified_base (1)..(1): 2'-O-methyl corresponding base
  modified_base (2)..(2): 2'-O-methyl corresponding base
  modified_base (3)..(3): 2'-O-methyl corresponding base
  modified_base (4)..(4): 2'-O-methyl corresponding base
  modified_base (5)..(5): 2'-hydroxy corresponding base
  modified_base (6)..(6): 2'-hydroxy corresponding base
  modified_base (7)..(7): 2'-hydroxy corresponding base
  modified_base (8)..(8): 2'-O-methyl corresponding base
  modified_base (9)..(9): 2'-hydroxy corresponding base
  modified_base (10)..(10): 2'-O-methyl corresponding base
  modified_base (11)..(11): 2'-O-methyl corresponding base
  modified_base (12)..(12): 2'-hydroxy corresponding base
  modified_base (13)..(13): 2'-hydroxy corresponding base
  modified_base (14)..(14): 2'-O-methyl corresponding base
  modified_base (15)..(15): 2'-hydroxy corresponding base
  modified_base (16)..(16): 2'-O-methyl corresponding base
  modified_base (17)..(17): 2'-hydroxy corresponding base
  modified_base (18)..(18): 2'-O-methyl corresponding base
  modified_base (19)..(19): 2'-hydroxy corresponding base
  modified_base (20)..(20): deoxythymidine
  modified_base (21)..(21): 5'-thio thymidine
uccuagacaccagcauacatt

SEQ ID NO: 304 - DNA, 21 bp, Artificial Sequence
  Description of Artificial Sequence: Synthetic oligonucleotide
  Description of Combined DNA/RNA Molecule: Synthetic oligonucleotide
  siRNAs to PCSK9
  modified_base (1)..(1): 2'-hydroxy corresponding base
  modified_base (2)..(2): 2'-hydroxy corresponding base
  modified_base (3)..(3): 2'-O-methyl corresponding base
  modified_base (4)..(4): 2'-hydroxy corresponding base
  modified_base (5)..(5): 2'-hydroxy corresponding base
  modified_base (6)..(6): 2'-hydroxy corresponding base
  modified_base (7)..(7): 2'-hydroxy corresponding base
  modified_base (8)..(8): 2'-hydroxy corresponding base
  modified_base (9)..(9): 2'-hydroxy corresponding base
  modified_base (10)..(10): 2'-hydroxy corresponding base
  modified_base (11)..(11): 2'-hydroxy corresponding base
  modified_base (12)..(12): 2'-hydroxy corresponding base
  modified_base (13)..(13): 2'-hydroxy corresponding base
  modified_base (14)..(14): 2'-hydroxy corresponding base
  modified_base (15)..(15): 2'-O-methyl corresponding base
  modified_base (16)..(16): 2'-hydroxy corresponding base
  modified_base (17)..(17): 2'-hydroxy corresponding base
  modified_base (18)..(18): 2'-hydroxy corresponding base
  modified_base (19)..(19): 2'-hydroxy corresponding base
  modified_base (20)..(20): deoxythymidine
  modified_base (21)..(21): 5'-thio thymidine
uguaugcuggugucuaggatt

SEQ ID NO: 305 - DNA, 21 bp, Artificial Sequence
  Description of Artificial Sequence: Synthetic oligonucleotide
  Description of Combined DNA/RNA Molecule: Synthetic oligonucleotide
  siRNAs to PCSK9
  modified_base (1)..(1): 2'-hydroxy corresponding base
  modified_base (2)..(2): 2'-hydroxy corresponding base
  modified_base (3)..(3): 2'-hydroxy corresponding base
  modified_base (4)..(4): 2'-hydroxy corresponding base
  modified_base (5)..(5): 2'-hydroxy corresponding base
  modified_base (6)..(6): 2'-hydroxy corresponding base
  modified_base (7)..(7): 2'-hydroxy corresponding base
  modified_base (8)..(8): 2'-hydroxy corresponding base
  modified_base (9)..(9): 2'-hydroxy corresponding base
  modified_base (10)..(10): 2'-hydroxy corresponding base
  modified_base (11)..(11): 2'-hydroxy corresponding base
  modified_base (12)..(12): 2'-hydroxy corresponding base
  modified_base (13)..(13): 2'-hydroxy corresponding base
  modified_base (14)..(14): 2'-hydroxy corresponding base
  modified_base (15)..(15): 2'-hydroxy corresponding base
  modified_base (16)..(16): 2'-hydroxy corresponding base
  modified_base (17)..(17): 2'-hydroxy corresponding base
  modified_base (18)..(18): 2'-hydroxy corresponding base
  modified_base (19)..(19): 2'-hydroxy corresponding base
  modified_base (20)..(20): deoxythymidine
  modified_base (21)..(21): 5'-thio thymidine
ccuagacaccagcauacagtt

SEQ ID NO: 306 - DNA, 21 bp, Artificial Sequence
  Description of Artificial Sequence: Synthetic oligonucleotide
  Description of Combined DNA/RNA Molecule: Synthetic oligonucleotide
  siRNAs to PCSK9
  modified_base (1)..(1): 2'-hydroxy corresponding base
  modified_base (2)..(2): 2'-hydroxy corresponding base
  modified_base (3)..(3): 2'-hydroxy corresponding base
  modified_base (4)..(4): 2'-hydroxy corresponding base
  modified_base (5)..(5): 2'-hydroxy corresponding base
  modified_base (6)..(6): 2'-hydroxy corresponding base
  modified_base (7)..(7): 2'-hydroxy corresponding base
  modified_base (8)..(8): 2'-hydroxy corresponding base
  modified_base (9)..(9): 2'-hydroxy corresponding base
  modified_base (10)..(10): 2'-hydroxy corresponding base
  modified_base (11)..(11): 2'-hydroxy corresponding base
  modified_base (12)..(12): 2'-hydroxy corresponding base
  modified_base (13)..(13): 2'-hydroxy corresponding base
  modified_base (14)..(14): 2'-hydroxy corresponding base
  modified_base (15)..(15): 2'-hydroxy corresponding base
  modified_base (16)..(16): 2'-hydroxy corresponding base
  modified_base (17)..(17): 2'-hydroxy corresponding base
  modified_base (18)..(18): 2'-hydroxy corresponding base
  modified_base (19)..(19): 2'-hydroxy corresponding base
  modified_base (20)..(20): deoxythymidine
  modified_base (21)..(21): 5'-thio thymidine
cuguaugcuggugucuaggtt

SEQ ID NO: 307 - DNA, 21 bp, Artificial Sequence
  Description of Artificial Sequence: Synthetic oligonucleotide
  Description of Combined DNA/RNA Molecule: Synthetic oligonucleotide
  siRNAs to PCSK9
  modified_base (1)..(1): 2'-O-methyl corresponding base
  modified_base (2)..(2): 2'-O-methyl corresponding base
  modified_base (3)..(3): 2'-O-methyl corresponding base
  modified_base (4)..(4): 2'-hydroxy corresponding base
  modified_base (5)..(5): 2'-hydroxy corresponding base
  modified_base (6)..(6): 2'-hydroxy corresponding base
  modified_base (7)..(7): 2'-O-methyl corresponding base
  modified_base (8)..(8): 2'-hydroxy corresponding base
  modified_base (9)..(9): 2'-O-methyl corresponding base
  modified_base (10)..(10): 2'-O-methyl corresponding base
  modified_base (11)..(11): 2'-hydroxy corresponding base
  modified_base (12)..(12): 2'-hydroxy corresponding base
  modified_base (13)..(13): 2'-O-methyl corresponding base
  modified_base (14)..(14): 2'-hydroxy corresponding base
  modified_base (15)..(15): 2'-O-methyl corresponding base
  modified_base (16)..(16): 2'-hydroxy corresponding base
  modified_base (17)..(17): 2'-O-methyl corresponding base
  modified_base (18)..(18): 2'-hydroxy corresponding base
  modified_base (19)..(19): 2'-hydroxy corresponding base
  modified_base (20)..(20): deoxythymidine
  modified_base (21)..(21): 5'-thio thymidine
ccuagacaccagcauacagtt

SEQ ID NO: 308 - DNA, 21 bp, Artificial Sequence
  Description of Artificial Sequence: Synthetic oligonucleotide
  Description of Combined DNA/RNA Molecule: Synthetic oligonucleotide
  siRNAs to PCSK9
  modified_base (1)..(1): 2'-hydroxy corresponding base
  modified_base (2)..(2): 2'-hydroxy corresponding base
  modified_base (3)..(3): 2'-hydroxy corresponding base
  modified_base (4)..(4): 2'-O-methyl corresponding base
  modified_base (5)..(5): 2'-hydroxy corresponding base
  modified_base (6)..(6): 2'-hydroxy corresponding base
  modified_base (7)..(7): 2'-hydroxy corresponding base
  modified_base (8)..(8): 2'-hydroxy corresponding base
  modified_base (9)..(9): 2'-hydroxy corresponding base
  modified_base (10)..(10): 2'-hydroxy corresponding base
  modified_base (11)..(11): 2'-hydroxy corresponding base
  modified_base (12)..(12): 2'-hydroxy corresponding base
  modified_base (13)..(13): 2'-hydroxy corresponding base
  modified_base (14)..(14): 2'-hydroxy corresponding base
  modified_base (15)..(15): 2'-hydroxy corresponding base
  modified_base (16)..(16): 2'-O-methyl corresponding base
  modified_base (17)..(17): 2'-hydroxy corresponding base
  modified_base (18)..(18): 2'-hydroxy corresponding base
  modified_base (19)..(19): 2'-hydroxy corresponding base
  modified_base (20)..(20): deoxythymidine
  modified_base (21)..(21): 5'-thio thymidine
cuguaugcuggugucuaggtt

SEQ ID NO: 309 - DNA, 21 bp, Artificial Sequence
  Description of Artificial Sequence: Synthetic oligonucleotide
  Description of Combined DNA/RNA Molecule: Synthetic oligonucleotide
  siRNAs to PCSK9
  modified_base (1)..(1): 2'-hydroxy corresponding base
  modified_base (2)..(2): 2'-hydroxy corresponding base
  modified_base (3)..(3): 2'-hydroxy corresponding base
  modified_base (4)..(4): 2'-hydroxy corresponding base
  modified_base (5)..(5): 2'-hydroxy corresponding base
  modified_base (6)..(6): 2'-hydroxy corresponding base
  modified_base (7)..(7): 2'-hydroxy corresponding base
  modified_base (8)..(8): 2'-hydroxy corresponding base
  modified_base (9)..(9): 2'-hydroxy corresponding base
  modified_base (10)..(10): 2'-hydroxy corresponding base
  modified_base (11)..(11): 2'-hydroxy corresponding base
  modified_base (12)..(12): 2'-hydroxy corresponding base
  modified_base (13)..(13): 2'-hydroxy corresponding base
  modified_base (14)..(14): 2'-hydroxy corresponding base
  modified_base (15)..(15): 2'-hydroxy corresponding base
  modified_base (16)..(16): 2'-hydroxy corresponding base
  modified_base (17)..(17): 2'-hydroxy corresponding base
  modified_base (18)..(18): 2'-hydroxy corresponding base
  modified_base (19)..(19): 2'-hydroxy corresponding base
  modified_base (20)..(20): deoxythymidine
  modified_base (21)..(21): 5'-thio thymidine
gacaccagcauacagagugtt

SEQ ID NO: 310 - DNA, 21 bp, Artificial Sequence
  Description of Artificial Sequence: Synthetic oligonucleotide
  Description of Combined DNA/RNA Molecule: Synthetic oligonucleotide
  siRNAs to PCSK9
  modified_base (1)..(1): 2'-hydroxy corresponding base
  modified_base (2)..(2): 2'-hydroxy corresponding base
  modified_base (3)..(3): 2'-hydroxy corresponding base
  modified_base (4)..(4): 2'-hydroxy corresponding base
  modified_base (5)..(5): 2'-hydroxy corresponding base
  modified_base (6)..(6): 2'-hydroxy corresponding base
  modified_base (7)..(7): 2'-hydroxy corresponding base
  modified_base (8)..(8): 2'-hydroxy corresponding base
  modified_base (9)..(9): 2'-hydroxy corresponding base
  modified_base (10)..(10): 2'-hydroxy corresponding base
  modified_base (11)..(11): 2'-hydroxy corresponding base
  modified_base (12)..(12): 2'-hydroxy corresponding base
  modified_base (13)..(13): 2'-hydroxy corresponding base
  modified_base (14)..(14): 2'-hydroxy corresponding base
  modified_base (15)..(15): 2'-hydroxy corresponding base
  modified_base (16)..(16): 2'-hydroxy corresponding base
  modified_base (17)..(17): 2'-hydroxy corresponding base
  modified_base (18)..(18): 2'-hydroxy corresponding base
  modified_base (19)..(19): 2'-hydroxy corresponding base
  modified_base (20)..(20): deoxythymidine
  modified_base (21)..(21): 5'-thio thymidine
cacucuguaugcugguguctt

SEQ ID NO: 311 - DNA, 21 bp, Artificial Sequence
  Description of Artificial Sequence: Synthetic oligonucleotide
  Description of Combined DNA/RNA Molecule: Synthetic oligonucleotide
  siRNAs to PCSK9
  modified_base (1)..(1): 2'-hydroxy corresponding base
  modified_base (2)..(2): 2'-hydroxy corresponding base
  modified_base (3)..(3): 2'-O-methyl corresponding base
  modified_base (4)..(4): 2'-hydroxy corresponding base
  modified_base (5)..(5): 2'-O-methyl corresponding base
  modified_base (6)..(6): 2'-O-methyl corresponding base
  modified_base (7)..(7): 2'-hydroxy corresponding base
  modified_base (8)..(8): 2'-hydroxy corresponding base
  modified_base (9)..(9): 2'-O-methyl corresponding base
  modified_base (10)..(10): 2'-hydroxy corresponding base
  modified_base (11)..(11): 2'-O-methyl corresponding base
  modified_base (12)..(12): 2'-hydroxy corresponding base
  modified_base (13)..(13): 2'-O-methyl corresponding base
  modified_base (14)..(14): 2'-hydroxy corresponding base
  modified_base (15)..(15): 2'-hydroxy corresponding base
  modified_base (16)..(16): 2'-hydroxy corresponding base
  modified_base (17)..(17): 2'-hydroxy corresponding base
  modified_base (18)..(18): 2'-O-methyl corresponding base
  modified_base (19)..(19): 2'-hydroxy corresponding base
  modified_base (20)..(20): deoxythymidine
  modified_base (21)..(21): 5'-thio thymidine
gacaccagcauacagagugtt

SEQ ID NO: 312 - DNA, 21 bp, Artificial Sequence
  Description of Artificial Sequence: Synthetic oligonucleotide
  Description of Combined DNA/RNA Molecule: Synthetic oligonucleotide
  siRNAs to PCSK9
  modified_base (1)..(1): 2'-O-methyl corresponding base
  modified_base (2)..(2): 2'-hydroxy corresponding base
  modified_base (3)..(3): 2'-hydroxy corresponding base
  modified_base (4)..(4): 2'-hydroxy corresponding base
  modified_base (5)..(5): 2'-hydroxy corresponding base
  modified_base (6)..(6): 2'-hydroxy corresponding base
  modified_base (7)..(7): 2'-hydroxy corresponding base
  modified_base (8)..(8): 2'-O-methyl corresponding base
  modified_base (9)..(9): 2'-hydroxy corresponding base
  modified_base (10)..(10): 2'-hydroxy corresponding base
  modified_base (11)..(11): 2'-hydroxy corresponding base
  modified_base (12)..(12): 2'-hydroxy corresponding base
  modified_base (13)..(13): 2'-hydroxy corresponding base
  modified_base (14)..(14): 2'-hydroxy corresponding base
  modified_base (15)..(15): 2'-hydroxy corresponding base
  modified_base (16)..(16): 2'-hydroxy corresponding base
  modified_base (17)..(17): 2'-hydroxy corresponding base
  modified_base (18)..(18): 2'-hydroxy corresponding base
  modified_base (19)..(19): 2'-hydroxy corresponding base
  modified_base (20)..(20): deoxythymidine
  modified_base (21)..(21): 5'-thio thymidine
cacucuguaugcugguguctt

SEQ ID NO: 313 - DNA, 21 bp, Artificial Sequence
  Description of Artificial Sequence: Synthetic oligonucleotide
  Description of Combined DNA/RNA Molecule: Synthetic oligonucleotide
  siRNAs to PCSK9
  modified_base (1)..(1): 2'-hydroxy corresponding base
  modified_base (2)..(2): 2'-hydroxy corresponding base
  modified_base (3)..(3): 2'-hydroxy corresponding base
  modified_base (4)..(4): 2'-hydroxy corresponding base
  modified_base (5)..(5): 2'-hydroxy corresponding base
  modified_base (6)..(6): 2'-hydroxy corresponding base
  modified_base (7)..(7): 2'-hydroxy corresponding base
  modified_base (8)..(8): 2'-hydroxy corresponding base
  modified_base (9)..(9): 2'-hydroxy corresponding base
  modified_base (10)..(10): 2'-hydroxy corresponding base
  modified_base (11)..(11): 2'-hydroxy corresponding base
  modified_base (12)..(12): 2'-hydroxy corresponding base
  modified_base (13)..(13): 2'-hydroxy corresponding base
  modified_base (14)..(14): 2'-hydroxy corresponding base
  modified_base (15)..(15): 2'-hydroxy corresponding base
  modified_base (16)..(16): 2'-hydroxy corresponding base
  modified_base (17)..(17): 2'-hydroxy corresponding base
  modified_base (18)..(18): 2'-hydroxy corresponding base
  modified_base (19)..(19): 2'-hydroxy corresponding base
  modified_base (20)..(20): deoxythymidine
  modified_base (21)..(21): 5'-thio thymidine
cauacagagugaccaccggtt

SEQ ID NO: 314 - DNA, 21 bp, Artificial Sequence
  Description of Artificial Sequence: Synthetic oligonucleotide
  Description of Combined DNA/RNA Molecule: Synthetic oligonucleotide
  siRNAs to PCSK9
  modified_base (1)..(1): 2'-hydroxy corresponding base
  modified_base (2)..(2): 2'-hydroxy corresponding base
  modified_base (3)..(3): 2'-hydroxy corresponding base
  modified_base (4)..(4): 2'-hydroxy corresponding base
  modified_base (5)..(5): 2'-hydroxy corresponding base
  modified_base (6)..(6): 2'-hydroxy corresponding base
  modified_base (7)..(7): 2'-hydroxy corresponding base
  modified_base (8)..(8): 2'-hydroxy corresponding base
  modified_base (9)..(9): 2'-hydroxy corresponding base
  modified_base (10)..(10): 2'-hydroxy corresponding base
  modified_base (11)..(11): 2'-hydroxy corresponding base
  modified_base (12)..(12): 2'-hydroxy corresponding base
  modified_base (13)..(13): 2'-hydroxy corresponding base
  modified_base (14)..(14): 2'-hydroxy corresponding base
  modified_base (15)..(15): 2'-hydroxy corresponding base
  modified_base (16)..(16): 2'-hydroxy corresponding base
  modified_base (17)..(17): 2'-hydroxy corresponding base
  modified_base (18)..(18): 2'-hydroxy corresponding base
  modified_base (19)..(19): 2'-hydroxy corresponding base
  modified_base (20)..(20): deoxythymidine
  modified_base (21)..(21): 5'-thio thymidine
ccgguggucacucuguaugtt

SEQ ID NO: 315 - DNA, 21 bp, Artificial Sequence
  Description of Artificial Sequence: Synthetic oligonucleotide
  Description of Combined DNA/RNA Molecule: Synthetic oligonucleotide
  siRNAs to PCSK9
  modified_base (1)..(1): 2'-O-methyl corresponding base
  modified_base (2)..(2): 2'-hydroxy corresponding base
  modified_base (3)..(3): 2'-O-methyl corresponding base
  modified_base (4)..(4): 2'-hydroxy corresponding base
  modified_base (5)..(5): 2'-O-methyl corresponding base
  modified_base (6)..(6): 2'-hydroxy corresponding base
  modified_base (7)..(7): 2'-hydroxy corresponding base
  modified_base (8)..(8): 2'-hydroxy corresponding base
  modified_base (9)..(9): 2'-hydroxy corresponding base
  modified_base (10)..(10): 2'-O-methyl corresponding base
  modified_base (11)..(11): 2'-hydroxy corresponding base
  modified_base (12)..(12): 2'-hydroxy corresponding base
  modified_base (13)..(13): 2'-O-methyl corresponding base
  modified_base (14)..(14): 2'-O-methyl corresponding base
  modified_base (15)..(15): 2'-hydroxy corresponding base
  modified_base (16)..(16): 2'-O-methyl corresponding base
  modified_base (17)..(17): 2'-O-methyl corresponding base
  modified_base (18)..(18): 2'-hydroxy corresponding base
  modified_base (19)..(19): 2'-hydroxy corresponding base
  modified_base (20)..(20): deoxythymidine
  modified_base (21)..(21): 5'-thio thymidine
cauacagagugaccaccggtt

SEQ ID NO: 316 - DNA, 21 bp, Artificial Sequence
  Description of Artificial Sequence: Synthetic oligonucleotide
  Description of Combined DNA/RNA Molecule: Synthetic oligonucleotide
  siRNAs to PCSK9
  modified_base (1)..(1): 2'-hydroxy corresponding base
  modified_base (2)..(2): 2'-hydroxy corresponding base
  modified_base (3)..(3): 2'-hydroxy corresponding base
  modified_base (4)..(4): 2'-hydroxy corresponding base
  modified_base (5)..(5): 2'-hydroxy corresponding base
  modified_base (6)..(6): 2'-hydroxy corresponding base
  modified_base (7)..(7): 2'-hydroxy corresponding base
  modified_base (8)..(8): 2'-hydroxy corresponding base
  modified_base (9)..(9): 2'-O-methyl corresponding base
  modified_base (10)..(10): 2'-hydroxy corresponding base
  modified_base (11)..(11): 2'-hydroxy corresponding base
  modified_base (12)..(12): 2'-hydroxy corresponding base
  modified_base (13)..(13): 2'-hydroxy corresponding base
  modified_base (14)..(14): 2'-hydroxy corresponding base
  modified_base (15)..(15): 2'-hydroxy corresponding base
  modified_base (16)..(16): 2'-O-methyl corresponding base
  modified_base (17)..(17): 2'-hydroxy corresponding base
  modified_base (18)..(18): 2'-hydroxy corresponding base
  modified_base (19)..(19): 2'-hydroxy corresponding base
  modified_base (20)..(20): deoxythymidine
  modified_base (21)..(21): 5'-thio thymidine
ccgguggucacucuguaugtt

SEQ ID NO: 317 - DNA, 21 bp, Artificial Sequence
  Description of Artificial Sequence: Synthetic oligonucleotide
  Description of Combined DNA/RNA Molecule: Synthetic oligonucleotide
  siRNAs to PCSK9
  modified_base (1)..(1): 2'-hydroxy corresponding base
  modified_base (2)..(2): 2'-hydroxy corresponding base
  modified_base (3)..(3): 2'-hydroxy corresponding base
  modified_base (4)..(4): 2'-hydroxy corresponding base
  modified_base (5)..(5): 2'-hydroxy corresponding base
  modified_base (6)..(6): 2'-hydroxy corresponding base
  modified_base (7)..(7): 2'-hydroxy corresponding base
  modified_base (8)..(8): 2'-hydroxy corresponding base
  modified_base (9)..(9): 2'-hydroxy corresponding base
  modified_base (10)..(10): 2'-hydroxy corresponding base
  modified_base (11)..(11): 2'-hydroxy corresponding base
  modified_base (12)..(12): 2'-hydroxy corresponding base
  modified_base (13)..(13): 2'-hydroxy corresponding base
  modified_base (14)..(14): 2'-hydroxy corresponding base
  modified_base (15)..(15): 2'-hydroxy corresponding base
  modified_base (16)..(16): 2'-hydroxy corresponding base
  modified_base (17)..(17): 2'-hydroxy corresponding base
  modified_base (18)..(18): 2'-hydroxy corresponding base
  modified_base (19)..(19): 2'-hydroxy corresponding base
  modified_base (20)..(20): deoxythymidine
  modified_base (21)..(21): 5'-thio thymidine
agagugaccaccgggaaautt

SEQ ID NO: 318 - DNA, 21 bp, Artificial Sequence
  Description of Artificial Sequence: Synthetic oligonucleotide
  Description of Combined DNA/RNA Molecule: Synthetic oligonucleotide
  siRNAs to PCSK9
  modified_base (1)..(1): 2'-hydroxy corresponding base
  modified_base (2)..(2): 2'-hydroxy corresponding base
  modified_base (3)..(3): 2'-hydroxy corresponding base
  modified_base (4)..(4): 2'-hydroxy corresponding base
  modified_base (5)..(5): 2'-hydroxy corresponding base
  modified_base (6)..(6): 2'-hydroxy corresponding base
  modified_base (7)..(7): 2'-hydroxy corresponding base
  modified_base (8)..(8): 2'-hydroxy corresponding base
  modified_base (9)..(9): 2'-hydroxy corresponding base
  modified_base (10)..(10): 2'-hydroxy corresponding base
  modified_base (11)..(11): 2'-hydroxy corresponding base
  modified_base (12)..(12): 2'-hydroxy corresponding base
  modified_base (13)..(13): 2'-hydroxy corresponding base
  modified_base (14)..(14): 2'-hydroxy corresponding base
  modified_base (15)..(15): 2'-hydroxy corresponding base
  modified_base (16)..(16): 2'-hydroxy corresponding base
  modified_base (17)..(17): 2'-hydroxy corresponding base
  modified_base (18)..(18): 2'-hydroxy corresponding base
  modified_base (19)..(19): 2'-hydroxy corresponding base
  modified_base (20)..(20): deoxythymidine
  modified_base (21)..(21): 5'-thio thymidine
auuucccgguggucacucutt

SEQ ID NO: 319 - DNA, 21 bp, Artificial Sequence
  Description of Artificial Sequence: Synthetic oligonucleotide
  Description of Combined DNA/RNA Molecule: Synthetic oligonucleotide
  siRNAs to PCSK9
  modified_base (1)..(1): 2'-hydroxy corresponding base
  modified_base (2)..(2): 2'-hydroxy corresponding base
  modified_base (3)..(3): 2'-hydroxy corresponding base
  modified_base (4)..(4): 2'-hydroxy corresponding base
  modified_base (5)..(5): 2'-O-methyl corresponding base
  modified_base (6)..(6): 2'-hydroxy corresponding base
  modified_base (7)..(7): 2'-hydroxy corresponding base
  modified_base (8)..(8): 2'-O-methyl corresponding base
  modified_base (9)..(9): 2'-O-methyl corresponding base
  modified_base (10)..(10): 2'-hydroxy corresponding base
  modified_base (11)..(11): 2'-O-methyl corresponding base
  modified_base (12)..(12): 2'-O-methyl corresponding base
  modified_base (13)..(13): 2'-hydroxy corresponding base
  modified_base (14)..(14): 2'-hydroxy corresponding base
  modified_base (15)..(15): 2'-hydroxy corresponding base
  modified_base (16)..(16): 2'-hydroxy corresponding base
  modified_base (17)..(17): 2'-hydroxy corresponding base
  modified_base (18)..(18): 2'-hydroxy corresponding base
  modified_base (19)..(19): 2'-O-methyl corresponding base
  modified_base (20)..(20): deoxythymidine
  modified_base (21)..(21): 5'-thio thymidine
agagugaccaccgggaaautt

SEQ ID NO: 320 - DNA, 21 bp, Artificial Sequence
  Description of Artificial Sequence: Synthetic oligonucleotide
  Description of Combined DNA/RNA Molecule: Synthetic oligonucleotide
  siRNAs to PCSK9
  modified_base (1)..(1): 2'-hydroxy corresponding base
  modified_base (2)..(2): 2'-hydroxy corresponding base
  modified_base (3)..(3): 2'-hydroxy corresponding base
  modified_base (4)..(4): 2'-hydroxy corresponding base
  modified_base (5)..(5): 2'-hydroxy corresponding base
  modified_base (6)..(6): 2'-hydroxy corresponding base
  modified_base (7)..(7): 2'-hydroxy corresponding base
  modified_base (8)..(8): 2'-hydroxy corresponding base
  modified_base (9)..(9): 2'-hydroxy corresponding base
  modified_base (10)..(10): 2'-hydroxy corresponding base
  modified_base (11)..(11): 2'-hydroxy corresponding base
  modified_base (12)..(12): 2'-hydroxy corresponding base
  modified_base (13)..(13): 2'-hydroxy corresponding base
  modified_base (14)..(14): 2'-O-methyl corresponding base
  modified_base (15)..(15): 2'-hydroxy corresponding base
  modified_base (16)..(16): 2'-hydroxy corresponding base
  modified_base (17)..(17): 2'-hydroxy corresponding base
  modified_base (18)..(18): 2'-hydroxy corresponding base
  modified_base (19)..(19): 2'-hydroxy corresponding base
  modified_base (20)..(20): deoxythymidine
  modified_base (21)..(21): 5'-thio thymidine
auuucccgguggucacucutt

SEQ ID NO: 321 - DNA, 21 bp, Artificial Sequence
  Description of Artificial Sequence: Synthetic oligonucleotide
  Description of Combined DNA/RNA Molecule: Synthetic oligonucleotide
  siRNAs to PCSK9
  modified_base (1)..(1): 2'-hydroxy corresponding base
  modified_base (2)..(2): 2'-hydroxy corresponding base
  modified_base (3)..(3): 2'-hydroxy corresponding base
  modified_base (4)..(4): 2'-hydroxy corresponding base
  modified_base (5)..(5): 2'-hydroxy corresponding base
  modified_base (6)..(6): 2'-hydroxy corresponding base
  modified_base (7)..(7): 2'-hydroxy corresponding base
  modified_base (8)..(8): 2'-hydroxy corresponding base
  modified_base (9)..(9): 2'-hydroxy corresponding base
  modified_base (10)..(10): 2'-hydroxy corresponding base
  modified_base (11)..(11): 2'-hydroxy corresponding base
  modified_base (12)..(12): 2'-hydroxy corresponding base
  modified_base (13)..(13): 2'-hydroxy corresponding base
  modified_base (14)..(14): 2'-hydroxy corresponding base
  modified_base (15)..(15): 2'-hydroxy corresponding base
  modified_base (16)..(16): 2'-hydroxy corresponding base
  modified_base (17)..(17): 2'-hydroxy corresponding base
  modified_base (18)..(18): 2'-hydroxy corresponding base
  modified_base (19)..(19): 2'-hydroxy corresponding base
  modified_base (20)..(20): deoxythymidine
  modified_base (21)..(21): 5'-thio thymidine
gagugaccaccgggaaauctt

SEQ ID NO: 322 - DNA, 21 bp, Artificial Sequence
  Description of Artificial Sequence: Synthetic oligonucleotide
  Description of Combined DNA/RNA Molecule: Synthetic oligonucleotide
  siRNAs to PCSK9
  modified_base (1)..(1): 2'-hydroxy corresponding base
  modified_base (2)..(2): 2'-hydroxy corresponding base
  modified_base (3)..(3): 2'-hydroxy corresponding base
  modified_base (4)..(4): 2'-hydroxy corresponding base
  modified_base (5)..(5): 2'-hydroxy corresponding base
  modified_base (6)..(6): 2'-hydroxy corresponding base
  modified_base (7)..(7): 2'-hydroxy corresponding base
  modified_base (8)..(8): 2'-hydroxy corresponding base
  modified_base (9)..(9): 2'-hydroxy corresponding base
  modified_base (10)..(10): 2'-hydroxy corresponding base
  modified_base (11)..(11): 2'-hydroxy corresponding base
  modified_base (12)..(12): 2'-hydroxy corresponding base
  modified_base (13)..(13): 2'-hydroxy corresponding base
  modified_base (14)..(14): 2'-hydroxy corresponding base
  modified_base (15)..(15): 2'-hydroxy corresponding base
  modified_base (16)..(16): 2'-hydroxy corresponding base
  modified_base (17)..(17): 2'-hydroxy corresponding base
  modified_base (18)..(18): 2'-hydroxy corresponding base
  modified_base (19)..(19): 2'-hydroxy corresponding base
  modified_base (20)..(20): deoxythymidine
  modified_base (21)..(21): 5'-thio thymidine
gauuucccgguggucacuctt

SEQ ID NO: 323 - DNA, 21 bp, Artificial Sequence
  Description of Artificial Sequence: Synthetic oligonucleotide
  Description of Combined DNA/RNA Molecule: Synthetic oligonucleotide
  siRNAs to PCSK9
  modified_base (1)..(1): 2'-hydroxy corresponding base
  modified_base (2)..(2): 2'-hydroxy corresponding base
  modified_base (3)..(3): 2'-hydroxy corresponding base
  modified_base (4)..(4): 2'-O-methyl corresponding base
  modified_base (5)..(5): 2'-hydroxy corresponding base
  modified_base (6)..(6): 2'-hydroxy corresponding base
  modified_base (7)..(7): 2'-O-methyl corresponding base
  modified_base (8)..(8): 2'-O-methyl corresponding base
  modified_base (9)..(9): 2'-hydroxy corresponding base
  modified_base (10)..(10): 2'-O-methyl corresponding base
  modified_base (11)..(11): 2'-O-methyl corresponding base
  modified_base (12)..(12): 2'-hydroxy corresponding base
  modified_base (13)..(13): 2'-hydroxy corresponding base
  modified_base (14)..(14): 2'-hydroxy corresponding base
  modified_base (15)..(15): 2'-hydroxy corresponding base
  modified_base (16)..(16): 2'-hydroxy corresponding base
  modified_base (17)..(17): 2'-hydroxy corresponding base
  modified_base (18)..(18): 2'-O-methyl corresponding base
  modified_base (19)..(19): 2'-O-methyl corresponding base
  modified_base (20)..(20): deoxythymidine
  modified_base (21)..(21): 5'-thio thymidine
gagugaccaccgggaaauctt

SEQ ID NO: 324 - DNA, 21 bp, Artificial Sequence
  Description of Artificial Sequence: Synthetic oligonucleotide
  Description of Combined DNA/RNA Molecule: Synthetic oligonucleotide
  siRNAs to PCSK9
  modified_base (1)..(1): 2'-hydroxy corresponding base
  modified_base (2)..(2): 2'-hydroxy corresponding base
  modified_base (3)..(3): 2'-hydroxy corresponding base
  modified_base (4)..(4): 2'-hydroxy corresponding base
  modified_base (5)..(5): 2'-hydroxy corresponding base
  modified_base (6)..(6): 2'-hydroxy corresponding base
  modified_base (7)..(7): 2'-hydroxy corresponding base
  modified_base (8)..(8): 2'-hydroxy corresponding base
  modified_base (9)..(9): 2'-hydroxy corresponding base
  modified_base (10)..(10): 2'-hydroxy corresponding base
  modified_base (11)..(11): 2'-hydroxy corresponding base
  modified_base (12)..(12): 2'-hydroxy corresponding base
  modified_base (13)..(13): 2'-hydroxy corresponding base
  modified_base (14)..(14): 2'-hydroxy corresponding base
  modified_base (15)..(15): 2'-O-methyl corresponding base
  modified_base (16)..(16): 2'-hydroxy corresponding base
  modified_base (17)..(17): 2'-hydroxy corresponding base
  modified_base (18)..(18): 2'-hydroxy corresponding base
  modified_base (19)..(19): 2'-hydroxy corresponding base
  modified_base (20)..(20): deoxythymidine
  modified_base (21)..(21): 5'-thio thymidine
gauuucccgguggucacuctt

SEQ ID NO: 325 - DNA, 21 bp, Artificial Sequence
  Description of Artificial Sequence: Synthetic oligonucleotide
  Description of Combined DNA/RNA Molecule: Synthetic oligonucleotide
  siRNAs to PCSK9
  modified_base (1)..(1): 2'-hydroxy corresponding base
  modified_base (2)..(2): 2'-hydroxy corresponding base
  modified_base (3)..(3): 2'-hydroxy corresponding base
  modified_base (4)..(4): 2'-hydroxy corresponding base
  modified_base (5)..(5): 2'-hydroxy corresponding base
  modified_base (6)..(6): 2'-hydroxy corresponding base
  modified_base (7)..(7): 2'-hydroxy corresponding base
  modified_base (8)..(8): 2'-hydroxy corresponding base
  modified_base (9)..(9): 2'-hydroxy corresponding base
  modified_base (10)..(10): 2'-hydroxy corresponding base
  modified_base (11)..(11): 2'-hydroxy corresponding base
  modified_base (12)..(12): 2'-hydroxy corresponding base
  modified_base (13)..(13): 2'-hydroxy corresponding base
  modified_base (14)..(14): 2'-hydroxy corresponding base
  modified_base (15)..(15): 2'-hydroxy corresponding base
  modified_base (16)..(16): 2'-hydroxy corresponding base
  modified_base (17)..(17): 2'-hydroxy corresponding base
  modified_base (18)..(18): 2'-hydroxy corresponding base
  modified_base (19)..(19): 2'-hydroxy corresponding base
  modified_base (20)..(20): deoxythymidine
  modified_base (21)..(21): 5'-thio thymidine
gugaccaccgggaaaucgatt

SEQ ID NO: 326 - DNA, 21 bp, Artificial Sequence
  Description of Artificial Sequence: Synthetic oligonucleotide
  Description of Combined DNA/RNA Molecule: Synthetic oligonucleotide
  siRNAs to PCSK9
  modified_base (1)..(1): 2'-hydroxy corresponding base
  modified_base (2)..(2): 2'-hydroxy corresponding base
  modified_base (3)..(3): 2'-hydroxy corresponding base
  modified_base (4)..(4): 2'-hydroxy corresponding base
  modified_base (5)..(5): 2'-hydroxy corresponding base
  modified_base (6)..(6): 2'-hydroxy corresponding base
  modified_base (7)..(7): 2'-hydroxy corresponding base
  modified_base (8)..(8): 2'-hydroxy corresponding base
  modified_base (9)..(9): 2'-hydroxy corresponding base
  modified_base (10)..(10): 2'-hydroxy corresponding base
  modified_base (11)..(11): 2'-hydroxy corresponding base
  modified_base (12)..(12): 2'-hydroxy corresponding base
  modified_base (13)..(13): 2'-hydroxy corresponding base
  modified_base (14)..(14): 2'-hydroxy corresponding base
  modified_base (15)..(15): 2'-hydroxy corresponding base
  modified_base (16)..(16): 2'-hydroxy corresponding base
  modified_base (17)..(17): 2'-hydroxy corresponding base
  modified_base (18)..(18): 2'-hydroxy corresponding base
  modified_base (19)..(19): 2'-hydroxy corresponding base
  modified_base (20)..(20): deoxythymidine
  modified_base (21)..(21): 5'-thio thymidine
ucgauuucccgguggucactt

SEQ ID NO: 327 - DNA, 21 bp, Artificial Sequence
  Description of Artificial Sequence: Synthetic oligonucleotide
  Description of Combined DNA/RNA Molecule: Synthetic oligonucleotide
  siRNAs to PCSK9
  modified_base (1)..(1): 2'-hydroxy corresponding base
  modified_base (2)..(2): 2'-O-methyl corresponding base
  modified_base (3)..(3): 2'-hydroxy corresponding base
  modified_base (4)..(4): 2'-hydroxy corresponding base
  modified_base (5)..(5): 2'-O-methyl corresponding base
  modified_base (6)..(6): 2'-O-methyl corresponding base
  modified_base (7)..(7): 2'-hydroxy corresponding base
  modified_base (8)..(8): 2'-O-methyl corresponding base
  modified_base (9)..(9): 2'-O-methyl corresponding base
  modified_base (10)..(10): 2'-hydroxy corresponding base
  modified_base (11)..(11): 2'-hydroxy corresponding base
  modified_base (12)..(12): 2'-hydroxy corresponding base
  modified_base (13)..(13): 2'-hydroxy corresponding base
  modified_base (14)..(14): 2'-hydroxy corresponding base
  modified_base (15)..(15): 2'-hydroxy corresponding base
  modified_base (16)..(16): 2'-O-methyl corresponding base
  modified_base (17)..(17): 2'-O-methyl corresponding base
  modified_base (18)..(18): 2'-hydroxy corresponding base
  modified_base (19)..(19): 2'-hydroxy corresponding base
  modified_base (20)..(20): deoxythymidine
  modified_base (21)..(21): 5'-thio thymidine
gugaccaccgggaaaucgatt

SEQ ID NO: 328 - DNA, 21 bp, Artificial Sequence
  Description of Artificial Sequence: Synthetic oligonucleotide
  Description of Combined DNA/RNA Molecule: Synthetic oligonucleotide
  siRNAs to PCSK9
  modified_base (1)..(1): 2'-hydroxy corresponding base
  modified_base (2)..(2): 2'-hydroxy corresponding base
  modified_base (3)..(3): 2'-hydroxy corresponding base
  modified_base (4)..(4): 2'-hydroxy corresponding base
  modified_base (5)..(5): 2'-hydroxy corresponding base
  modified_base (6)..(6): 2'-hydroxy corresponding base
  modified_base (7)..(7): 2'-hydroxy corresponding base
  modified_base (8)..(8): 2'-hydroxy corresponding base
  modified_base (9)..(9): 2'-hydroxy corresponding base
  modified_base (10)..(10): 2'-hydroxy corresponding base
  modified_base (11)..(11): 2'-hydroxy corresponding base
  modified_base (12)..(12): 2'-hydroxy corresponding base
  modified_base (13)..(13): 2'-hydroxy corresponding base
  modified_base (14)..(14): 2'-hydroxy corresponding base
  modified_base (15)..(15): 2'-hydroxy corresponding base
  modified_base (16)..(16): 2'-hydroxy corresponding base
  modified_base (17)..(17): 2'-O-methyl corresponding base
  modified_base (18)..(18): 2'-hydroxy corresponding base
  modified_base (19)..(19): 2'-hydroxy corresponding base
  modified_base (20)..(20): deoxythymidine
  modified_base (21)..(21): 5'-thio thymidine
ucgauuucccgguggucactt

SEQ ID NO: 329 - DNA, 21 bp, Artificial Sequence
  Description of Artificial Sequence: Synthetic oligonucleotide
  Description of Combined DNA/RNA Molecule: Synthetic oligonucleotide
  siRNAs to PCSK9
  modified_base (1)..(1): 2'-hydroxy corresponding base
  modified_base (2)..(2): 2'-hydroxy corresponding base
  modified_base (3)..(3): 2'-hydroxy corresponding base
  modified_base (4)..(4): 2'-hydroxy corresponding base
  modified_base (5)..(5): 2'-hydroxy corresponding base
  modified_base (6)..(6): 2'-hydroxy corresponding base
  modified_base (7)..(7): 2'-hydroxy corresponding base
  modified_base (8)..(8): 2'-hydroxy corresponding base
  modified_base (9)..(9): 2'-hydroxy corresponding base
  modified_base (10)..(10): 2'-hydroxy corresponding base
  modified_base (11)..(11): 2'-hydroxy corresponding base
  modified_base (12)..(12): 2'-hydroxy corresponding base
  modified_base (13)..(13): 2'-hydroxy corresponding base
  modified_base (14)..(14): 2'-hydroxy corresponding base
  modified_base (15)..(15): 2'-hydroxy corresponding base
  modified_base (16)..(16): 2'-hydroxy corresponding base
  modified_base (17)..(17): 2'-hydroxy corresponding base
  modified_base (18)..(18): 2'-hydroxy corresponding base
  modified_base (19)..(19): 2'-hydroxy corresponding base
  modified_base (20)..(20): deoxythymidine
  modified_base (21)..(21): 5'-thio thymidine
gaccaccgggaaaucgaggtt

SEQ ID NO: 330 - DNA, 21 bp, Artificial Sequence
  Description of Artificial Sequence: Synthetic oligonucleotide
  Description of Combined DNA/RNA Molecule: Synthetic oligonucleotide
  siRNAs to PCSK9
  modified_base (1)..(1): 2'-hydroxy corresponding base
  modified_base (2)..(2): 2'-hydroxy corresponding base
  modified_base (3)..(3): 2'-hydroxy corresponding base
  modified_base (4)..(4): 2'-hydroxy corresponding base
  modified_base (5)..(5): 2'-hydroxy corresponding base
  modified_base (6)..(6): 2'-hydroxy corresponding base
  modified_base (7)..(7): 2'-hydroxy corresponding base
  modified_base (8)..(8): 2'-hydroxy corresponding base
  modified_base (9)..(9): 2'-hydroxy corresponding base
  modified_base (10)..(10): 2'-hydroxy corresponding base
  modified_base (11)..(11): 2'-hydroxy corresponding base
  modified_base (12)..(12): 2'-hydroxy corresponding base
  modified_base (13)..(13): 2'-hydroxy corresponding base
  modified_base (14)..(14): 2'-hydroxy corresponding base
  modified_base (15)..(15): 2'-hydroxy corresponding base
  modified_base (16)..(16): 2'-hydroxy corresponding base
  modified_base (17)..(17): 2'-hydroxy corresponding base
  modified_base (18)..(18): 2'-hydroxy corresponding base
  modified_base (19)..(19): 2'-hydroxy corresponding base
  modified_base (20)..(20): deoxythymidine
  modified_base (21)..(21): 5'-thio thymidine
ccucgauuucccggugguctt

SEQ ID NO: 331 - DNA, 21 bp, Artificial Sequence
  Description of Artificial Sequence: Synthetic oligonucleotide
  Description of Combined DNA/RNA Molecule: Synthetic oligonucleotide
  siRNAs to PCSK9
  modified_base (1)..(1): 2'-hydroxy corresponding base
  modified_base (2)..(2): 2'-hydroxy corresponding base
  modified_base (3)..(3): 2'-O-methyl corresponding base
  modified_base (4)..(4): 2'-O-methyl corresponding base
  modified_base (5)..(5): 2'-hydroxy corresponding base
  modified_base (6)..(6): 2'-O-methyl corresponding base
  modified_base (7)..(7): 2'-O-methyl corresponding base
  modified_base (8)..(8): 2'-hydroxy corresponding base
  modified_base (9)..(9): 2'-hydroxy corresponding base
  modified_base (10)..(10): 2'-hydroxy corresponding base
  modified_base (11)..(11): 2'-hydroxy corresponding base
  modified_base (12)..(12): 2'-hydroxy corresponding base
  modified_base (13)..(13): 2'-hydroxy corresponding base
  modified_base (14)..(14): 2'-O-methyl corresponding base
  modified_base (15)..(15): 2'-O-methyl corresponding base
  modified_base (16)..(16): 2'-hydroxy corresponding base
  modified_base (17)..(17): 2'-hydroxy corresponding base
  modified_base (18)..(18): 2'-hydroxy corresponding base
  modified_base (19)..(19): 2'-hydroxy corresponding base
  modified_base (20)..(20): deoxythymidine
  modified_base (21)..(21): 5'-thio thymidine
gaccaccgggaaaucgaggtt

SEQ ID NO: 332 - DNA, 21 bp, Artificial Sequence
  Description of Artificial Sequence: Synthetic oligonucleotide
  Description of Combined DNA/RNA Molecule: Synthetic oligonucleotide
  siRNAs to PCSK9
  modified_base (1)..(1): 2'-hydroxy corresponding base
  modified_base (2)..(2): 2'-hydroxy corresponding base
  modified_base (3)..(3): 2'-hydroxy corresponding base
  modified_base (4)..(4): 2'-hydroxy corresponding base
  modified_base (5)..(5): 2'-hydroxy corresponding base
  modified_base (6)..(6): 2'-hydroxy corresponding base
  modified_base (7)..(7): 2'-hydroxy corresponding base
  modified_base (8)..(8): 2'-hydroxy corresponding base
  modified_base (9)..(9): 2'-hydroxy corresponding base
  modified_base (10)..(10): 2'-hydroxy corresponding base
  modified_base (11)..(11): 2'-hydroxy corresponding base
  modified_base (12)..(12): 2'-hydroxy corresponding base
  modified_base (13)..(13): 2'-hydroxy corresponding base
  modified_base (14)..(14): 2'-hydroxy corresponding base
  modified_base (15)..(15): 2'-hydroxy corresponding base
  modified_base (16)..(16): 2'-hydroxy corresponding base
  modified_base (17)..(17): 2'-hydroxy corresponding base
  modified_base (18)..(18): 2'-hydroxy corresponding base
  modified_base (19)..(19): 2'-hydroxy corresponding base
  modified_base (20)..(20): deoxythymidine
  modified_base (21)..(21): 5'-thio thymidine
ccucgauuucccggugguctt

SEQ ID NO: 333 - DNA, 21 bp, Artificial Sequence
  Description of Artificial Sequence: Synthetic oligonucleotide
  Description of Combined DNA/RNA Molecule: Synthetic oligonucleotide
  siRNAs to PCSK9
  modified_base (1)..(1): 2'-hydroxy corresponding base
  modified_base (2)..(2): 2'-hydroxy corresponding base
  modified_base (3)..(3): 2'-hydroxy corresponding base
  modified_base (4)..(4): 2'-hydroxy corresponding base
  modified_base (5)..(5): 2'-hydroxy corresponding base
  modified_base (6)..(6): 2'-hydroxy corresponding base
  modified_base (7)..(7): 2'-hydroxy corresponding base
  modified_base (8)..(8): 2'-hydroxy corresponding base
  modified_base (9)..(9): 2'-hydroxy corresponding base
  modified_base (10)..(10): 2'-hydroxy corresponding base
  modified_base (11)..(11): 2'-hydroxy corresponding base
  modified_base (12)..(12): 2'-hydroxy corresponding base
  modified_base (13)..(13): 2'-hydroxy corresponding base
  modified_base (14)..(14): 2'-hydroxy corresponding base
  modified_base (15)..(15): 2'-hydroxy corresponding base
  modified_base (16)..(16): 2'-hydroxy corresponding base
  modified_base (17)..(17): 2'-hydroxy corresponding base
  modified_base (18)..(18): 2'-hydroxy corresponding base
  modified_base (19)..(19): 2'-hydroxy corresponding base
  modified_base (20)..(20): deoxythymidine
  modified_base (21)..(21): 5'-thio thymidine
accaccgggaaaucgagggtt

SEQ ID NO: 334 - DNA, 21 bp, Artificial Sequence
  Description of Artificial Sequence: Synthetic oligonucleotide
  Description of Combined DNA/RNA Molecule: Synthetic oligonucleotide
  siRNAs to PCSK9
  modified_base (1)..(1): 2'-hydroxy corresponding base
  modified_base (2)..(2): 2'-hydroxy corresponding base
  modified_base (3)..(3): 2'-hydroxy corresponding base
  modified_base (4)..(4): 2'-hydroxy corresponding base
  modified_base (5)..(5): 2'-hydroxy corresponding base
  modified_base (6)..(6): 2'-hydroxy corresponding base
  modified_base (7)..(7): 2'-hydroxy corresponding base
  modified_base (8)..(8): 2'-hydroxy corresponding base
  modified_base (9)..(9): 2'-hydroxy corresponding base
  modified_base (10)..(10): 2'-hydroxy corresponding base
  modified_base (11)..(11): 2'-hydroxy corresponding base
  modified_base (12)..(12): 2'-hydroxy corresponding base
  modified_base (13)..(13): 2'-hydroxy corresponding base
  modified_base (14)..(14): 2'-hydroxy corresponding base
  modified_base (15)..(15): 2'-hydroxy corresponding base
  modified_base (16)..(16): 2'-hydroxy corresponding base
  modified_base (17)..(17): 2'-hydroxy corresponding base
  modified_base (18)..(18): 2'-hydroxy corresponding base
  modified_base (19)..(19): 2'-hydroxy corresponding base
  modified_base (20)..(20): deoxythymidine
  modified_base (21)..(21): 5'-thio thymidine
cccucgauuucccgguggutt

SEQ ID NO: 335 - DNA, 21 bp, Artificial Sequence
  Description of Artificial Sequence: Synthetic oligonucleotide
  Description of Combined DNA/RNA Molecule: Synthetic oligonucleotide
  siRNAs to PCSK9
  modified_base (1)..(1): 2'-hydroxy corresponding base
  modified_base (2)..(2): 2'-O-methyl corresponding base
  modified_base (3)..(3): 2'-O-methyl corresponding base
  modified_base (4)..(4): 2'-hydroxy corresponding base
  modified_base (5)..(5): 2'-O-methyl corresponding base
  modified_base (6)..(6): 2'-O-methyl corresponding base
  modified_base (7)..(7): 2'-hydroxy corresponding base
  modified_base (8)..(8): 2'-hydroxy corresponding base
  modified_base (9)..(9): 2'-hydroxy corresponding base
  modified_base (10)..(10): 2'-hydroxy corresponding base
  modified_base (11)..(11): 2'-hydroxy corresponding base
  modified_base (12)..(12): 2'-hydroxy corresponding base
  modified_base (13)..(13): 2'-O-methyl corresponding base
  modified_base (14)..(14): 2'-O-methyl corresponding base
  modified_base (15)..(15): 2'-hydroxy corresponding base
  modified_base (16)..(16): 2'-hydroxy corresponding base
  modified_base (17)..(17): 2'-hydroxy corresponding base
  modified_base (18)..(18): 2'-hydroxy corresponding base
  modified_base (19)..(19): 2'-hydroxy corresponding base
  modified_base (20)..(20): deoxythymidine
  modified_base (21)..(21): 5'-thio thymidine
accaccgggaaaucgagggtt

SEQ ID NO: 336 - DNA, 21 bp, Artificial Sequence
  Description of Artificial Sequence: Synthetic oligonucleotide
  Description of Combined DNA/RNA Molecule: Synthetic oligonucleotide
  siRNAs to PCSK9
  modified_base (1)..(1): 2'-hydroxy corresponding base
  modified_base (2)..(2): 2'-hydroxy corresponding base
  modified_base (3)..(3): 2'-hydroxy corresponding base
  modified_base (4)..(4): 2'-hydroxy corresponding base
  modified_base (5)..(5): 2'-hydroxy corresponding base
  modified_base (6)..(6): 2'-hydroxy corresponding base
  modified_base (7)..(7): 2'-hydroxy corresponding base
  modified_base (8)..(8): 2'-hydroxy corresponding base
  modified_base (9)..(9): 2'-hydroxy corresponding base
  modified_base (10)..(10): 2'-hydroxy corresponding base
  modified_base (11)..(11): 2'-hydroxy corresponding base
  modified_base (12)..(12): 2'-hydroxy corresponding base
  modified_base (13)..(13): 2'-hydroxy corresponding base
  modified_base (14)..(14): 2'-hydroxy corresponding base
  modified_base (15)..(15): 2'-hydroxy corresponding base
  modified_base (16)..(16): 2'-hydroxy corresponding base
  modified_base (17)..(17): 2'-hydroxy corresponding base
  modified_base (18)..(18): 2'-hydroxy corresponding base
  modified_base (19)..(19): 2'-hydroxy corresponding base
  modified_base (20)..(20): deoxythymidine
  modified_base (21)..(21): 5'-thio thymidine
cccucgauuucccgguggutt

SEQ ID NO: 337 - DNA, 21 bp, Artificial Sequence
  Description of Artificial Sequence: Synthetic oligonucleotide
  Description of Combined DNA/RNA Molecule: Synthetic oligonucleotide
  siRNAs to PCSK9
  modified_base (1)..(1): 2'-hydroxy corresponding base
  modified_base (2)..(2): 2'-hydroxy corresponding base
  modified_base (3)..(3): 2'-hydroxy corresponding base
  modified_base (4)..(4): 2'-hydroxy corresponding base
  modified_base (5)..(5): 2'-hydroxy corresponding base
  modified_base (6)..(6): 2'-hydroxy corresponding base
  modified_base (7)..(7): 2'-hydroxy corresponding base
  modified_base (8)..(8): 2'-hydroxy corresponding base
  modified_base (9)..(9): 2'-hydroxy corresponding base
  modified_base (10)..(10): 2'-hydroxy corresponding base
  modified_base (11)..(11): 2'-hydroxy corresponding base
  modified_base (12)..(12): 2'-hydroxy corresponding base
  modified_base (13)..(13): 2'-hydroxy corresponding base
  modified_base (14)..(14): 2'-hydroxy corresponding base
  modified_base (15)..(15): 2'-hydroxy corresponding base
  modified_base (16)..(16): 2'-hydroxy corresponding base
  modified_base (17)..(17): 2'-hydroxy corresponding base
  modified_base (18)..(18): 2'-hydroxy corresponding base
  modified_base (19)..(19): 2'-hydroxy corresponding base
  modified_base (20)..(20): deoxythymidine
  modified_base (21)..(21): 5'-thio thymidine
ccaccgggaaaucgagggctt

SEQ ID NO: 338 - DNA, 21 bp, Artificial Sequence
  Description of Artificial Sequence: Synthetic oligonucleotide
  Description of Combined DNA/RNA Molecule: Synthetic oligonucleotide
  siRNAs to PCSK9
  modified_base (1)..(1): 2'-hydroxy corresponding base
  modified_base (2)..(2): 2'-hydroxy corresponding base
  modified_base (3)..(3): 2'-hydroxy corresponding base
  modified_base (4)..(4): 2'-hydroxy corresponding base
  modified_base (5)..(5): 2'-hydroxy corresponding base
  modified_base (6)..(6): 2'-hydroxy corresponding base
  modified_base (7)..(7): 2'-hydroxy corresponding base
  modified_base (8)..(8): 2'-hydroxy corresponding base
  modified_base (9)..(9): 2'-hydroxy corresponding base
  modified_base (10)..(10): 2'-hydroxy corresponding base
  modified_base (11)..(11): 2'-hydroxy corresponding base
  modified_base (12)..(12): 2'-hydroxy corresponding base
  modified_base (13)..(13): 2'-hydroxy corresponding base
  modified_base (14)..(14): 2'-hydroxy corresponding base
  modified_base (15)..(15): 2'-hydroxy corresponding base
  modified_base (16)..(16): 2'-hydroxy corresponding base
  modified_base (17)..(17): 2'-hydroxy corresponding base
  modified_base (18)..(18): 2'-hydroxy corresponding base
  modified_base (19)..(19): 2'-hydroxy corresponding base
  modified_base (20)..(20): deoxythymidine
  modified_base (21)..(21): 5'-thio thymidine
gcccucgauuucccgguggtt

SEQ ID NO: 339 - DNA, 21 bp, Artificial Sequence
  Description of Artificial Sequence: Synthetic oligonucleotide
  Description of Combined DNA/RNA Molecule: Synthetic oligonucleotide
  siRNAs to PCSK9
  modified_base (1)..(1): 2'-O-methyl corresponding base
  modified_base (2)..(2): 2'-O-methyl corresponding base
  modified_base (3)..(3): 2'-hydroxy corresponding base
  modified_base (4)..(4): 2'-O-methyl corresponding base
  modified_base (5)..(5): 2'-O-methyl corresponding base
  modified_base (6)..(6): 2'-hydroxy corresponding base
  modified_base (7)..(7): 2'-hydroxy corresponding base
  modified_base (8)..(8): 2'-hydroxy corresponding base
  modified_base (9)..(9): 2'-hydroxy corresponding base
  modified_base (10)..(10): 2'-hydroxy corresponding base
  modified_base (11)..(11): 2'-hydroxy corresponding base
  modified_base (12)..(12): 2'-O-methyl corresponding base
  modified_base (13)..(13): 2'-O-methyl corresponding base
  modified_base (14)..(14): 2'-hydroxy corresponding base
  modified_base (15)..(15): 2'-hydroxy corresponding base
  modified_base (16)..(16): 2'-hydroxy corresponding base
  modified_base (17)..(17): 2'-hydroxy corresponding base
  modified_base (18)..(18): 2'-hydroxy corresponding base
  modified_base (19)..(19): 2'-O-methyl corresponding base
  modified_base (20)..(20): deoxythymidine
  modified_base (21)..(21): 5'-thio thymidine
ccaccgggaaaucgagggctt

SEQ ID NO: 340 - DNA, 21 bp, Artificial Sequence
  Description of Artificial Sequence: Synthetic oligonucleotide
  Description of Combined DNA/RNA Molecule: Synthetic oligonucleotide
  siRNAs to PCSK9
  modified_base (1)..(1): 2'-hydroxy corresponding base
  modified_base (2)..(2): 2'-hydroxy corresponding base
  modified_base (3)..(3): 2'-hydroxy corresponding base
  modified_base (4)..(4): 2'-hydroxy corresponding base
  modified_base (5)..(5): 2'-hydroxy corresponding base
  modified_base (6)..(6): 2'-hydroxy corresponding base
  modified_base (7)..(7): 2'-hydroxy corresponding base
  modified_base (8)..(8): 2'-hydroxy corresponding base
  modified_base (9)..(9): 2'-hydroxy corresponding base
  modified_base (10)..(10): 2'-hydroxy corresponding base
  modified_base (11)..(11): 2'-hydroxy corresponding base
  modified_base (12)..(12): 2'-hydroxy corresponding base
  modified_base (13)..(13): 2'-hydroxy corresponding base
  modified_base (14)..(14): 2'-hydroxy corresponding base
  modified_base (15)..(15): 2'-hydroxy corresponding base
  modified_base (16)..(16): 2'-hydroxy corresponding base
  modified_base (17)..(17): 2'-hydroxy corresponding base
  modified_base (18)..(18): 2'-hydroxy corresponding base
  modified_base (19)..(19): 2'-hydroxy corresponding base
  modified_base (20)..(20): deoxythymidine
  modified_base (21)..(21): 5'-thio thymidine
gcccucgauuucccgguggtt

SEQ ID NO: 341 - DNA, 21 bp, Artificial Sequence
  Description of Artificial Sequence: Synthetic oligonucleotide
  Description of Combined DNA/RNA Molecule: Synthetic oligonucleotide
  siRNAs to PCSK9
  modified_base (1)..(1): 2'-hydroxy corresponding base
  modified_base (2)..(2): 2'-hydroxy corresponding base
  modified_base (3)..(3): 2'-hydroxy corresponding base
  modified_base (4)..(4): 2'-hydroxy corresponding base
  modified_base (5)..(5): 2'-hydroxy corresponding base
  modified_base (6)..(6): 2'-hydroxy corresponding base
  modified_base (7)..(7): 2'-hydroxy corresponding base
  modified_base (8)..(8): 2'-hydroxy corresponding base
  modified_base (9)..(9): 2'-hydroxy corresponding base
  modified_base (10)..(10): 2'-hydroxy corresponding base
  modified_base (11)..(11): 2'-hydroxy corresponding base
  modified_base (12)..(12): 2'-hydroxy corresponding base
  modified_base (13)..(13): 2'-hydroxy corresponding base
  modified_base (14)..(14): 2'-hydroxy corresponding base
  modified_base (15)..(15): 2'-hydroxy corresponding base
  modified_base (16)..(16): 2'-hydroxy corresponding base
  modified_base (17)..(17): 2'-hydroxy corresponding base
  modified_base (18)..(18): 2'-hydroxy corresponding base
  modified_base (19)..(19): 2'-hydroxy corresponding base
  modified_base (20)..(20): deoxythymidine
  modified_base (21)..(21): 5'-thio thymidine
aaaucgagggcagggucautt

SEQ ID NO: 342 - DNA, 21 bp, Artificial Sequence
  Description of Artificial Sequence: Synthetic oligonucleotide
  Description of Combined DNA/RNA Molecule: Synthetic oligonucleotide
  siRNAs to PCSK9
  modified_base (1)..(1): 2'-hydroxy corresponding base
  modified_base (2)..(2): 2'-hydroxy corresponding base
  modified_base (3)..(3): 2'-hydroxy corresponding base
  modified_base (4)..(4): 2'-hydroxy corresponding base
  modified_base (5)..(5): 2'-hydroxy corresponding base
  modified_base (6)..(6): 2'-hydroxy corresponding base
  modified_base (7)..(7): 2'-hydroxy corresponding base
  modified_base (8)..(8): 2'-hydroxy corresponding base
  modified_base (9)..(9): 2'-hydroxy corresponding base
  modified_base (10)..(10): 2'-hydroxy corresponding base
  modified_base (11)..(11): 2'-hydroxy corresponding base
  modified_base (12)..(12): 2'-hydroxy corresponding base
  modified_base (13)..(13): 2'-hydroxy corresponding base
  modified_base (14)..(14): 2'-hydroxy corresponding base
  modified_base (15)..(15): 2'-hydroxy corresponding base
  modified_base (16)..(16): 2'-hydroxy corresponding base
  modified_base (17)..(17): 2'-hydroxy corresponding base
  modified_base (18)..(18): 2'-hydroxy corresponding base
  modified_base (19)..(19): 2'-hydroxy corresponding base
  modified_base (20)..(20): deoxythymidine
  modified_base (21)..(21): 5'-thio thymidine
augacccugcccucgauuutt

SEQ ID NO: 343 - DNA, 21 bp, Artificial Sequence
  Description of Artificial Sequence: Synthetic oligonucleotide
  Description of Combined DNA/RNA Molecule: Synthetic oligonucleotide
  siRNAs to PCSK9
  modified_base (1)..(1): 2'-hydroxy corresponding base
  modified_base (2)..(2): 2'-hydroxy corresponding base
  modified_base (3)..(3): 2'-hydroxy corresponding base
  modified_base (4)..(4): 2'-O-methyl corresponding base
  modified_base (5)..(5): 2'-O-methyl corresponding base
  modified_base (6)..(6): 2'-hydroxy corresponding base
  modified_base (7)..(7): 2'-hydroxy corresponding base
  modified_base (8)..(8): 2'-hydroxy corresponding base
  modified_base (9)..(9): 2'-hydroxy corresponding base
  modified_base (10)..(10): 2'-hydroxy corresponding base
  modified_base (11)..(11): 2'-O-methyl corresponding base
  modified_base (12)..(12): 2'-hydroxy corresponding base
  modified_base (13)..(13): 2'-hydroxy corresponding base
  modified_base (14)..(14): 2'-hydroxy corresponding base
  modified_base (15)..(15): 2'-hydroxy corresponding base
  modified_base (16)..(16): 2'-O-methyl corresponding base
  modified_base (17)..(17): 2'-O-methyl corresponding base
  modified_base (18)..(18): 2'-hydroxy corresponding base
  modified_base (19)..(19): 2'-O-methyl corresponding base
  modified_base (20)..(20): deoxythymidine
  modified_base (21)..(21): 5'-thio thymidine
aaaucgagggcagggucautt

SEQ ID NO: 344 - DNA, 21 bp, Artificial Sequence
  Description of Artificial Sequence: Synthetic oligonucleotide
  Description of Combined DNA/RNA Molecule: Synthetic oligonucleotide
  siRNAs to PCSK9
  modified_base (1)..(1): 2'-hydroxy corresponding base
  modified_base (2)..(2): 2'-hydroxy corresponding base
  modified_base (3)..(3): 2'-hydroxy corresponding base
  modified_base (4)..(4): 2'-hydroxy corresponding base
  modified_base (5)..(5): 2'-hydroxy corresponding base
  modified_base (6)..(6): 2'-hydroxy corresponding base
  modified_base (7)..(7): 2'-hydroxy corresponding base
  modified_base (8)..(8): 2'-hydroxy corresponding base
  modified_base (9)..(9): 2'-hydroxy corresponding base
  modified_base (10)..(10): 2'-hydroxy corresponding base
  modified_base (11)..(11): 2'-hydroxy corresponding base
  modified_base (12)..(12): 2'-hydroxy corresponding base
  modified_base (13)..(13): 2'-hydroxy corresponding base
  modified_base (14)..(14): 2'-hydroxy corresponding base
  modified_base (15)..(15): 2'-hydroxy corresponding base
  modified_base (16)..(16): 2'-hydroxy corresponding base
  modified_base (17)..(17): 2'-hydroxy corresponding base
  modified_base (18)..(18): 2'-hydroxy corresponding base
  modified_base (19)..(19): 2'-hydroxy corresponding base
  modified_base (20)..(20): deoxythymidine
  modified_base (21)..(21): 5'-thio thymidine
augacccugcccucgauuutt

SEQ ID NO: 345 - DNA, 21 bp, Artificial Sequence
  Description of Artificial Sequence: Synthetic oligonucleotide
  Description of Combined DNA/RNA Molecule: Synthetic oligonucleotide
  siRNAs to PCSK9
  modified_base (1)..(1): 2'-deoxy-2'-fluoro corresponding base
  modified_base (2)..(2): 2'-O-methyl corresponding base
  modified_base (3)..(3): 2'-deoxy-2'-fluoro corresponding base
  modified_base (4)..(4): 2'-O-methyl corresponding base
  modified_base (5)..(5): 2'-deoxy-2'-fluoro corresponding base
  modified_base (6)..(6): 2'-O-methyl corresponding base
  modified_base (7)..(7): 2'-deoxy-2'-fluoro corresponding base
  modified_base (8)..(8): 2'-O-methyl corresponding base
  modified_base (9)..(9): 2'-deoxy-2'-fluoro corresponding base
  modified_base (10)..(10): 2'-O-methyl corresponding base
  modified_base (11)..(11): 2'-deoxy-2'-fluoro corresponding base
  modified_base (12)..(12): 2'-O-methyl corresponding base
  modified_base (13)..(13): 2'-deoxy-2'-fluoro corresponding base
  modified_base (14)..(14): 2'-O-methyl corresponding base
  modified_base (15)..(15): 2'-deoxy-2'-fluoro corresponding base
  modified_base (16)..(16): 2'-O-methyl corresponding base
  modified_base (17)..(17): 2'-deoxy-2'-fluoro corresponding base
  modified_base (18)..(18): 2'-O-methyl corresponding base
  modified_base (19)..(19): 2'-deoxy-2'-fluoro corresponding base
  modified_base (20)..(20): deoxythymidine
  modified_base (21)..(21): 5'-thio thymidine
aaaucgagggcagggucautt

SEQ ID NO: 346 - DNA, 21 bp, Artificial Sequence
  Description of Artificial Sequence: Synthetic oligonucleotide
  Description of Combined DNA/RNA Molecule: Synthetic oligonucleotide
  siRNAs to PCSK9
  modified_base (1)..(1): 2'-O-methyl corresponding base
  modified_base (2)..(2): 2'-deoxy-2'-fluoro corresponding base
  modified_base (3)..(3): 2'-O-methyl corresponding base
  modified_base (4)..(4): 2'-deoxy-2'-fluoro corresponding base
  modified_base (5)..(5): 2'-O-methyl corresponding base
  modified_base (6)..(6): 2'-deoxy-2'-fluoro corresponding base
  modified_base (7)..(7): 2'-O-methyl corresponding base
  modified_base (8)..(8): 2'-deoxy-2'-fluoro corresponding base
  modified_base (9)..(9): 2'-O-methyl corresponding base
  modified_base (10)..(10): 2'-deoxy-2'-fluoro corresponding base
  modified_base (11)..(11): 2'-O-methyl corresponding base
  modified_base (12)..(12): 2'-deoxy-2'-fluoro corresponding base
  modified_base (13)..(13): 2'-O-methyl corresponding base
  modified_base (14)..(14): 2'-deoxy-2'-fluoro corresponding base
  modified_base (15)..(15): 2'-O-methyl corresponding base
  modified_base (16)..(16): 2'-deoxy-2'-fluoro corresponding base
  modified_base (17)..(17): 2'-O-methyl corresponding base
  modified_base (18)..(18): 2'-deoxy-2'-fluoro corresponding base
  modified_base (19)..(19): 2'-O-methyl corresponding base
  modified_base (20)..(20): deoxythymidine
  modified_base (21)..(21): 5'-thio thymidine
augacccugcccucgauuutt

SEQ ID NO: 347 - DNA, 21 bp, Artificial Sequence
  Description of Artificial Sequence: Synthetic oligonucleotide
  Description of Combined DNA/RNA Molecule: Synthetic oligonucleotide
  siRNAs to PCSK9
  modified_base (1)..(1): 2'-hydroxy corresponding base
  modified_base (2)..(2): 2'-hydroxy corresponding base
  modified_base (3)..(3): 2'-hydroxy corresponding base
  modified_base (4)..(4): 2'-deoxy-2'-fluoro corresponding base
  modified_base (5)..(5): 2'-deoxy-2'-fluoro corresponding base
  modified_base (6)..(6): 2'-hydroxy corresponding base
  modified_base (7)..(7): 2'-hydroxy corresponding base
  modified_base (8)..(8): 2'-hydroxy corresponding base
  modified_base (9)..(9): 2'-hydroxy corresponding base
  modified_base (10)..(10): 2'-hydroxy corresponding base
  modified_base (11)..(11): 2'-deoxy-2'-fluoro corresponding base
  modified_base (12)..(12): 2'-hydroxy corresponding base
  modified_base (13)..(13): 2'-hydroxy corresponding base
  modified_base (14)..(14): 2'-hydroxy corresponding base
  modified_base (15)..(15): 2'-hydroxy corresponding base
  modified_base (16)..(16): 2'-deoxy-2'-fluoro corresponding base
  modified_base (17)..(17): 2'-deoxy-2'-fluoro corresponding base
  modified_base (18)..(18): 2'-hydroxy corresponding base
  modified_base (19)..(19): 2'-deoxy-2'-fluoro corresponding base
  modified_base (20)..(20): deoxythymidine
  modified_base (21)..(21): 5'-thio thymidine
aaaucgagggcagggucautt

SEQ ID NO: 348 - DNA, 21 bp, Artificial Sequence
  Description of Artificial Sequence: Synthetic oligonucleotide
  Description of Combined DNA/RNA Molecule: Synthetic oligonucleotide
  siRNAs to PCSK9
  modified_base (1)..(1): 2'-hydroxy corresponding base
  modified_base (2)..(2): 2'-deoxy-2'-fluoro corresponding base
  modified_base (3)..(3): 2'-hydroxy corresponding base
  modified_base (4)..(4): 2'-hydroxy corresponding base
  modified_base (5)..(5): 2'-deoxy-2'-fluoro corresponding base
  modified_base (6)..(6): 2'-deoxy-2'-fluoro corresponding base
  modified_base (7)..(7): 2'-deoxy-2'-fluoro corresponding base
  modified_base (8)..(8): 2'-deoxy-2'-fluoro corresponding base
  modified_base (9)..(9): 2'-hydroxy corresponding base
  modified_base (10)..(10): 2'-deoxy-2'-fluoro corresponding base
  modified_base (11)..(11): 2'-deoxy-2'-fluoro corresponding base
  modified_base (12)..(12): 2'-deoxy-2'-fluoro corresponding base
  modified_base (13)..(13): 2'-deoxy-2'-fluoro corresponding base
  modified_base (14)..(14): 2'-deoxy-2'-fluoro corresponding base
  modified_base (15)..(15): 2'-hydroxy corresponding base
  modified_base (16)..(16): 2'-hydroxy corresponding base
  modified_base (17)..(17): 2'-deoxy-2'-fluoro corresponding base
  modified_base (18)..(18): 2'-deoxy-2'-fluoro corresponding base
  modified_base (19)..(19): 2'-deoxy-2'-fluoro corresponding base
  modified_base (20)..(20): deoxythymidine
  modified_base (21)..(21): 5'-thio thymidine
augacccugcccucgauuutt

SEQ ID NO: 349 - DNA, 21 bp, Artificial Sequence
  Description of Artificial Sequence: Synthetic oligonucleotide
  Description of Combined DNA/RNA Molecule: Synthetic oligonucleotide
  siRNAs to PCSK9
  modified_base (1)..(1): 2'-hydroxy corresponding base
  modified_base (2)..(2): 2'-O-methyl corresponding base
  modified_base (3)..(3): 2'-hydroxy corresponding base
  modified_base (4)..(4): 2'-O-methyl corresponding base
  modified_base (5)..(5): 2'-hydroxy corresponding base
  modified_base (6)..(6): 2'-O-methyl corresponding base
  modified_base (7)..(7): 2'-hydroxy corresponding base
  modified_base (8)..(8): 2'-O-methyl corresponding base
  modified_base (9)..(9): 2'-hydroxy corresponding base
  modified_base (10)..(10): 2'-O-methyl corresponding base
  modified_base (11)..(11): 2'-hydroxy corresponding base
  modified_base (12)..(12): 2'-O-methyl corresponding base
  modified_base (13)..(13): 2'-hydroxy corresponding base
  modified_base (14)..(14): 2'-O-methyl corresponding base
  modified_base (15)..(15): 2'-hydroxy corresponding base
  modified_base (16)..(16): 2'-O-methyl corresponding base
  modified_base (17)..(17): 2'-hydroxy corresponding base
  modified_base (18)..(18): 2'-O-methyl corresponding base
  modified_base (19)..(19): 2'-hydroxy corresponding base
  modified_base (20)..(20): deoxythymidine
  modified_base (21)..(21): 5'-thio thymidine
aaaucgagggcagggucautt

SEQ ID NO: 350 - DNA, 21 bp, Artificial Sequence
  Description of Artificial Sequence: Synthetic oligonucleotide
  Description of Combined DNA/RNA Molecule: Synthetic oligonucleotide
  siRNAs to PCSK9
  modified_base (1)..(1): 2'-O-methyl corresponding base
  modified_base (2)..(2): 2'-deoxy-2'-fluoro corresponding base
  modified_base (3)..(3): 2'-O-methyl corresponding base
  modified_base (4)..(4): 2'-deoxy-2'-fluoro corresponding base
  modified_base (5)..(5): 2'-O-methyl corresponding base
  modified_base (6)..(6): 2'-deoxy-2'-fluoro corresponding base
  modified_base (7)..(7): 2'-O-methyl corresponding base
  modified_base (8)..(8): 2'-deoxy-2'-fluoro corresponding base
  modified_base (9)..(9): 2'-O-methyl corresponding base
  modified_base (10)..(10): 2'-deoxy-2'-fluoro corresponding base
  modified_base (11)..(11): 2'-O-methyl corresponding base
  modified_base (12)..(12): 2'-deoxy-2'-fluoro corresponding base
  modified_base (13)..(13): 2'-O-methyl corresponding base
  modified_base (14)..(14): 2'-deoxy-2'-fluoro corresponding base
  modified_base (15)..(15): 2'-O-methyl corresponding base
  modified_base (16)..(16): 2'-deoxy-2'-fluoro corresponding base
  modified_base (17)..(17): 2'-O-methyl corresponding base
  modified_base (18)..(18): 2'-deoxy-2'-fluoro corresponding base
  modified_base (19)..(19): 2'-O-methyl corresponding base
  modified_base (20)..(20): deoxythymidine
  modified_base (21)..(21): 5'-thio thymidine
augacccugcccucgauuutt

SEQ ID NO: 351 - DNA, 21 bp, Artificial Sequence
  Description of Artificial Sequence: Synthetic oligonucleotide
  Description of Combined DNA/RNA Molecule: Synthetic oligonucleotide
  siRNAs to PCSK9
  modified_base (1)..(1): 2'-hydroxy corresponding base
  modified_base (2)..(2): 2'-O-methyl corresponding base
  modified_base (3)..(3): 2'-hydroxy corresponding base
  modified_base (4)..(4): 2'-O-methyl corresponding base
  modified_base (5)..(5): 2'-hydroxy corresponding base
  modified_base (6)..(6): 2'-O-methyl corresponding base
  modified_base (7)..(7): 2'-hydroxy corresponding base
  modified_base (8)..(8): 2'-O-methyl corresponding base
  modified_base (9)..(9): 2'-hydroxy corresponding base
  modified_base (10)..(10): 2'-O-methyl corresponding base
  modified_base (11)..(11): 2'-hydroxy corresponding base
  modified_base (12)..(12): 2'-O-methyl corresponding base
  modified_base (13)..(13): 2'-hydroxy corresponding base
  modified_base (14)..(14): 2'-O-methyl corresponding base
  modified_base (15)..(15): 2'-hydroxy corresponding base
  modified_base (16)..(16): 2'-O-methyl corresponding base
  modified_base (17)..(17): 2'-hydroxy corresponding base
  modified_base (18)..(18): 2'-O-methyl corresponding base
  modified_base (19)..(19): 2'-hydroxy corresponding base
  modified_base (20)..(20): deoxythymidine
  modified_base (21)..(21): 5'-thio thymidine
aaaucgagggcagggucautt

SEQ ID NO: 352 - DNA, 21 bp, Artificial Sequence
  Description of Artificial Sequence: Synthetic oligonucleotide
  Description of Combined DNA/RNA Molecule: Synthetic oligonucleotide
  siRNAs to PCSK9
  modified_base (1)..(1): 2'-hydroxy corresponding base
  modified_base (2)..(2): 2'-deoxy-2'-fluoro corresponding base
  modified_base (3)..(3): 2'-hydroxy corresponding base
  modified_base (4)..(4): 2'-hydroxy corresponding base
  modified_base (5)..(5): 2'-deoxy-2'-fluoro corresponding base
  modified_base (6)..(6): 2'-deoxy-2'-fluoro corresponding base
  modified_base (7)..(7): 2'-deoxy-2'-fluoro corresponding base
  modified_base (8)..(8): 2'-deoxy-2'-fluoro corresponding base
  modified_base (9)..(9): 2'-hydroxy corresponding base
  modified_base (10)..(10): 2'-deoxy-2'-fluoro corresponding base
  modified_base (11)..(11): 2'-deoxy-2'-fluoro corresponding base
  modified_base (12)..(12): 2'-deoxy-2'-fluoro corresponding base
  modified_base (13)..(13): 2'-deoxy-2'-fluoro corresponding base
  modified_base (14)..(14): 2'-deoxy-2'-fluoro corresponding base
  modified_base (15)..(15): 2'-hydroxy corresponding base
  modified_base (16)..(16): 2'-hydroxy corresponding base
  modified_base (17)..(17): 2'-deoxy-2'-fluoro corresponding base
  modified_base (18)..(18): 2'-deoxy-2'-fluoro corresponding base
  modified_base (19)..(19): 2'-deoxy-2'-fluoro corresponding base
  modified_base (20)..(20): deoxythymidine
  modified_base (21)..(21): 5'-thio thymidine
augacccugcccucgauuutt

SEQ ID NO: 353 - DNA, 21 bp, Artificial Sequence
  Description of Artificial Sequence: Synthetic oligonucleotide
  Description of Combined DNA/RNA Molecule: Synthetic oligonucleotide
  siRNAs to PCSK9
  modified_base (1)..(1): 2'-deoxy-2'-fluoro corresponding base
  modified_base (2)..(2): 2'-O-methyl corresponding base
  modified_base (3)..(3): 2'-deoxy-2'-fluoro corresponding base
  modified_base (4)..(4): 2'-O-methyl corresponding base
  modified_base (5)..(5): 2'-deoxy-2'-fluoro corresponding base
  modified_base (6)..(6): 2'-O-methyl corresponding base
  modified_base (7)..(7): 2'-deoxy-2'-fluoro corresponding base
  modified_base (8)..(8): 2'-O-methyl corresponding base
  modified_base (9)..(9): 2'-deoxy-2'-fluoro corresponding base
  modified_base (10)..(10): 2'-O-methyl corresponding base
  modified_base (11)..(11): 2'-deoxy-2'-fluoro corresponding base
  modified_base (12)..(12): 2'-O-methyl corresponding base
  modified_base (13)..(13): 2'-deoxy-2'-fluoro corresponding base
  modified_base (14)..(14): 2'-O-methyl corresponding base
  modified_base (15)..(15): 2'-deoxy-2'-fluoro corresponding base
  modified_base (16)..(16): 2'-O-methyl corresponding base
  modified_base (17)..(17): 2'-deoxy-2'-fluoro corresponding base
  modified_base (18)..(18): 2'-O-methyl corresponding base
  modified_base (19)..(19): 2'-deoxy-2'-fluoro corresponding base
  modified_base (20)..(20): deoxythymidine
  modified_base (21)..(21): 5'-thio thymidine
aaaucgagggcagggucautt

SEQ ID NO: 354 - DNA, 21 bp, Artificial Sequence
  Description of Artificial Sequence: Synthetic oligonucleotide
  Description of Combined DNA/RNA Molecule: Synthetic oligonucleotide
  siRNAs to PCSK9
  modified_base (1)..(1): 2'-hydroxy corresponding base
  modified_base (2)..(2): 2'-hydroxy corresponding base
  modified_base (3)..(3): 2'-hydroxy corresponding base
  modified_base (4)..(4): 2'-hydroxy corresponding base
  modified_base (5)..(5): 2'-hydroxy corresponding base
  modified_base (6)..(6): 2'-O-methyl corresponding base
  modified_base (7)..(7): 2'-O-methyl corresponding base
  modified_base (8)..(8): 2'-hydroxy corresponding base
  modified_base (9)..(9): 2'-hydroxy corresponding base
  modified_base (10)..(10): 2'-O-methyl corresponding base
  modified_base (11)..(11): 2'-O-methyl corresponding base
  modified_base (12)..(12): 2'-hydroxy corresponding base
  modified_base (13)..(13): 2'-hydroxy corresponding base
  modified_base (14)..(14): 2'-hydroxy corresponding base
  modified_base (15)..(15): 2'-hydroxy corresponding base
  modified_base (16)..(16): 2'-hydroxy corresponding base
  modified_base (17)..(17): 2'-O-methyl corresponding base
  modified_base (18)..(18): 2'-O-methyl corresponding base
  modified_base (19)..(19): 2'-O-methyl corresponding base
  modified_base (20)..(20): deoxythymidine
  modified_base (21)..(21): 5'-thio thymidine
augacccugcccucgauuutt

SEQ ID NO: 355 - DNA, 21 bp, Artificial Sequence
  Description of Artificial Sequence: Synthetic oligonucleotide
  Description of Combined DNA/RNA Molecule: Synthetic oligonucleotide
  siRNAs to PCSK9
  modified_base (1)..(1): 2'-hydroxy corresponding base
  modified_base (2)..(2): 2'-hydroxy corresponding base
  modified_base (3)..(3): 2'-hydroxy corresponding base
  modified_base (4)..(4): 2'-deoxy-2'-fluoro corresponding base
  modified_base (5)..(5): 2'-deoxy-2'-fluoro corresponding base
  modified_base (6)..(6): 2'-hydroxy corresponding base
  modified_base (7)..(7): 2'-hydroxy corresponding base
  modified_base (8)..(8): 2'-hydroxy corresponding base
  modified_base (9)..(9): 2'-hydroxy corresponding base
  modified_base (10)..(10): 2'-hydroxy corresponding base
  modified_base (11)..(11): 2'-deoxy-2'-fluoro corresponding base
  modified_base (12)..(12): 2'-hydroxy corresponding base
  modified_base (13)..(13): 2'-hydroxy corresponding base
  modified_base (14)..(14): 2'-hydroxy corresponding base
  modified_base (15)..(15): 2'-hydroxy corresponding base
  modified_base (16)..(16): 2'-deoxy-2'-fluoro corresponding base
  modified_base (17)..(17): 2'-deoxy-2'-fluoro corresponding base
  modified_base (18)..(18): 2'-hydroxy corresponding base
  modified_base (19)..(19): 2'-deoxy-2'-fluoro corresponding base
  modified_base (20)..(20): deoxythymidine
  modified_base (21)..(21): 5'-thio thymidine
aaaucgagggcagggucautt

SEQ ID NO: 356 - DNA, 21 bp, Artificial Sequence
  Description of Artificial Sequence: Synthetic oligonucleotide
  Description of Combined DNA/RNA Molecule: Synthetic oligonucleotide
  siRNAs to PCSK9
  modified_base (1)..(1): 2'-hydroxy corresponding base
  modified_base (2)..(2): 2'-hydroxy corresponding base
  modified_base (3)..(3): 2'-hydroxy corresponding base
  modified_base (4)..(4): 2'-hydroxy corresponding base
  modified_base (5)..(5): 2'-hydroxy corresponding base
  modified_base (6)..(6): 2'-O-methyl corresponding base
  modified_base (7)..(7): 2'-O-methyl corresponding base
  modified_base (8)..(8): 2'-hydroxy corresponding base
  modified_base (9)..(9): 2'-hydroxy corresponding base
  modified_base (10)..(10): 2'-O-methyl corresponding base
  modified_base (11)..(11): 2'-O-methyl corresponding base
  modified_base (12)..(12): 2'-hydroxy corresponding base
  modified_base (13)..(13): 2'-hydroxy corresponding base
  modified_base (14)..(14): 2'-hydroxy corresponding base
  modified_base (15)..(15): 2'-hydroxy corresponding base
  modified_base (16)..(16): 2'-hydroxy corresponding base
  modified_base (17)..(17): 2'-O-methyl corresponding base
  modified_base (18)..(18): 2'-O-methyl corresponding base
  modified_base (19)..(19): 2'-O-methyl corresponding base
  modified_base (20)..(20): deoxythymidine
  modified_base (21)..(21): 5'-thio thymidine
augacccugcccucgauuutt

SEQ ID NO: 357 - DNA, 21 bp, Artificial Sequence
  Description of Artificial Sequence: Synthetic oligonucleotide
  Description of Combined DNA/RNA Molecule: Synthetic oligonucleotide
  siRNAs to PCSK9
  modified_base (1)..(1): 2'-hydroxy corresponding base
  modified_base (2)..(2): 2'-O-methyl corresponding base
  modified_base (3)..(3): 2'-hydroxy corresponding base
  modified_base (4)..(4): 2'-O-methyl corresponding base
  modified_base (5)..(5): 2'-hydroxy corresponding base
  modified_base (6)..(6): 2'-O-methyl corresponding base
  modified_base (7)..(7): 2'-hydroxy corresponding base
  modified_base (8)..(8): 2'-O-methyl corresponding base
  modified_base (9)..(9): 2'-hydroxy corresponding base
  modified_base (10)..(10): 2'-O-methyl corresponding base
  modified_base (11)..(11): 2'-hydroxy corresponding base
  modified_base (12)..(12): 2'-O-methyl corresponding base
  modified_base (13)..(13): 2'-hydroxy corresponding base
  modified_base (14)..(14): 2'-O-methyl corresponding base
  modified_base (15)..(15): 2'-hydroxy corresponding base
  modified_base (16)..(16): 2'-O-methyl corresponding base
  modified_base (17)..(17): 2'-hydroxy corresponding base
  modified_base (18)..(18): 2'-O-methyl corresponding base
  modified_base (19)..(19): 2'-hydroxy corresponding base
  modified_base (20)..(20): deoxythymidine
  modified_base (21)..(21): 5'-thio thymidine
aaaucgagggcagggucautt

SEQ ID NO: 358 - DNA, 21 bp, Artificial Sequence
  Description of Artificial Sequence: Synthetic oligonucleotide
  Description of Combined DNA/RNA Molecule: Synthetic oligonucleotide
  siRNAs to PCSK9
  modified_base (1)..(1): 2'-hydroxy corresponding base
  modified_base (2)..(2): 2'-hydroxy corresponding base
  modified_base (3)..(3): 2'-hydroxy corresponding base
  modified_base (4)..(4): 2'-hydroxy corresponding base
  modified_base (5)..(5): 2'-hydroxy corresponding base
  modified_base (6)..(6): 2'-O-methyl corresponding base
  modified_base (7)..(7): 2'-O-methyl corresponding base
  modified_base (8)..(8): 2'-hydroxy corresponding base
  modified_base (9)..(9): 2'-hydroxy corresponding base
  modified_base (10)..(10): 2'-O-methyl corresponding base
  modified_base (11)..(11): 2'-O-methyl corresponding base
  modified_base (12)..(12): 2'-hydroxy corresponding base
  modified_base (13)..(13): 2'-hydroxy corresponding base
  modified_base (14)..(14): 2'-hydroxy corresponding base
  modified_base (15)..(15): 2'-hydroxy corresponding base
  modified_base (16)..(16): 2'-hydroxy corresponding base
  modified_base (17)..(17): 2'-O-methyl corresponding base
  modified_base (18)..(18): 2'-O-methyl corresponding base
  modified_base (19)..(19): 2'-O-methyl corresponding base
  modified_base (20)..(20): deoxythymidine
  modified_base (21)..(21): 5'-thio thymidine
augacccugcccucgauuutt

SEQ ID NO: 359 - DNA, 21 bp, Artificial Sequence
  Description of Artificial Sequence: Synthetic oligonucleotide
  Description of Combined DNA/RNA Molecule: Synthetic oligonucleotide
  siRNAs to PCSK9
  modified_base (1)..(1): 2'-deoxy-2'-fluoro corresponding base
  modified_base (2)..(2): 2'-O-methyl corresponding base
  modified_base (3)..(3): 2'-deoxy-2'-fluoro corresponding base
  modified_base (4)..(4): 2'-O-methyl corresponding base
  modified_base (5)..(5): 2'-deoxy-2'-fluoro corresponding base
  modified_base (6)..(6): 2'-O-methyl corresponding base
  modified_base (7)..(7): 2'-deoxy-2'-fluoro corresponding base
  modified_base (8)..(8): 2'-O-methyl corresponding base
  modified_base (9)..(9): 2'-deoxy-2'-fluoro corresponding base
  modified_base (10)..(10): 2'-O-methyl corresponding base
  modified_base (11)..(11): 2'-deoxy-2'-fluoro corresponding base
  modified_base (12)..(12): 2'-O-methyl corresponding base
  modified_base (13)..(13): 2'-deoxy-2'-fluoro corresponding base
  modified_base (14)..(14): 2'-O-methyl corresponding base
  modified_base (15)..(15): 2'-deoxy-2'-fluoro corresponding base
  modified_base (16)..(16): 2'-O-methyl corresponding base
  modified_base (17)..(17): 2'-deoxy-2'-fluoro corresponding base
  modified_base (18)..(18): 2'-O-methyl corresponding base
  modified_base (19)..(19): 2'-deoxy-2'-fluoro corresponding base
  modified_base (20)..(20): deoxythymidine
  modified_base (21)..(21): 5'-thio thymidine
cggcacccucauaggccugtt

SEQ ID NO: 360 - DNA, 21 bp, Artificial Sequence
  Description of Artificial Sequence: Synthetic oligonucleotide
  Description of Combined DNA/RNA Molecule: Synthetic oligonucleotide
  siRNAs to PCSK9
  modified_base (1)..(1): 2'-O-methyl corresponding base
  modified_base (2)..(2): 2'-deoxy-2'-fluoro corresponding base
  modified_base (3)..(3): 2'-O-methyl corresponding base
  modified_base (4)..(4): 2'-deoxy-2'-fluoro corresponding base
  modified_base (5)..(5): 2'-O-methyl corresponding base
  modified_base (6)..(6): 2'-deoxy-2'-fluoro corresponding base
  modified_base (7)..(7): 2'-O-methyl corresponding base
  modified_base (8)..(8): 2'-deoxy-2'-fluoro corresponding base
  modified_base (9)..(9): 2'-O-methyl corresponding base
  modified_base (10)..(10): 2'-deoxy-2'-fluoro corresponding base
  modified_base (11)..(11): 2'-O-methyl corresponding base
  modified_base (12)..(12): 2'-deoxy-2'-fluoro corresponding base
  modified_base (13)..(13): 2'-O-methyl corresponding base
  modified_base (14)..(14): 2'-deoxy-2'-fluoro corresponding base
  modified_base (15)..(15): 2'-O-methyl corresponding base
  modified_base (16)..(16): 2'-deoxy-2'-fluoro corresponding base
  modified_base (17)..(17): 2'-O-methyl corresponding base
  modified_base (18)..(18): 2'-deoxy-2'-fluoro corresponding base
  modified_base (19)..(19): 2'-O-methyl corresponding base
  modified_base (20)..(20): deoxythymidine
  modified_base (21)..(21): 5'-thio thymidine
caggccuaugagggugccgtt

SEQ ID NO: 361 - DNA, 21 bp, Artificial Sequence
  Description of Artificial Sequence: Synthetic oligonucleotide
  Description of Combined DNA/RNA Molecule: Synthetic oligonucleotide
  siRNAs to PCSK9
  modified_base (1)..(1): 2'-deoxy-2'-fluoro corresponding base
  modified_base (2)..(2): 2'-hydroxy corresponding base
  modified_base (3)..(3): 2'-hydroxy corresponding base
  modified_base (4)..(4): 2'-deoxy-2'-fluoro corresponding base
  modified_base (5)..(5): 2'-hydroxy corresponding base
  modified_base (6)..(6): 2'-deoxy-2'-fluoro corresponding base
  modified_base (7)..(7): 2'-deoxy-2'-fluoro corresponding base
  modified_base (8)..(8): 2'-deoxy-2'-fluoro corresponding base
  modified_base (9)..(9): 2'-deoxy-2'-fluoro corresponding base
  modified_base (10)..(10): 2'-deoxy-2'-fluoro corresponding base
  modified_base (11)..(11): 2'-hydroxy corresponding base
  modified_base (12)..(12): 2'-deoxy-2'-fluoro corresponding base
  modified_base (13)..(13): 2'-hydroxy corresponding base
  modified_base (14)..(14): 2'-hydroxy corresponding base
  modified_base (15)..(15): 2'-hydroxy corresponding base
  modified_base (16)..(16): 2'-deoxy-2'-fluoro corresponding base
  modified_base (17)..(17): 2'-deoxy-2'-fluoro corresponding base
  modified_base (18)..(18): 2'-deoxy-2'-fluoro corresponding base
  modified_base (19)..(19): 2'-hydroxy corresponding base
  modified_base (20)..(20): deoxythymidine
  modified_base (21)..(21): 5'-thio thymidine
cggcacccucauaggccugtt

SEQ ID NO: 362 - DNA, 21 bp, Artificial Sequence
  Description of Artificial Sequence: Synthetic oligonucleotide
  Description of Combined DNA/RNA Molecule: Synthetic oligonucleotide
  siRNAs to PCSK9
  modified_base (1)..(1): 2'-deoxy-2'-fluoro corresponding base
  modified_base (2)..(2): 2'-hydroxy corresponding base
  modified_base (3)..(3): 2'-hydroxy corresponding base
  modified_base (4)..(4): 2'-hydroxy corresponding base
  modified_base (5)..(5): 2'-deoxy-2'-fluoro corresponding base
  modified_base (6)..(6): 2'-deoxy-2'-fluoro corresponding base
  modified_base (7)..(7): 2'-deoxy-2'-fluoro corresponding base
  modified_base (8)..(8): 2'-hydroxy corresponding base
  modified_base (9)..(9): 2'-deoxy-2'-fluoro corresponding base
  modified_base (10)..(10): 2'-hydroxy corresponding base
  modified_base (11)..(11): 2'-hydroxy corresponding base
  modified_base (12)..(12): 2'-hydroxy corresponding base
  modified_base (13)..(13): 2'-hydroxy corresponding base
  modified_base (14)..(14): 2'-hydroxy corresponding base
  modified_base (15)..(15): 2'-deoxy-2'-fluoro corresponding base
  modified_base (16)..(16): 2'-hydroxy corresponding base
  modified_base (17)..(17): 2'-deoxy-2'-fluoro corresponding base
  modified_base (18)..(18): 2'-deoxy-2'-fluoro corresponding base
  modified_base (19)..(19): 2'-hydroxy corresponding base
  modified_base (20)..(20): deoxythymidine
  modified_base (21)..(21): 5'-thio thymidine
caggccuaugagggugccgtt

SEQ ID NO: 363 - DNA, 21 bp, Artificial Sequence
  Description of Artificial Sequence: Synthetic oligonucleotide
  Description of Combined DNA/RNA Molecule: Synthetic oligonucleotide
  siRNAs to PCSK9
  modified_base (1)..(1): 2'-hydroxy corresponding base
  modified_base (2)..(2): 2'-O-methyl corresponding base
  modified_base (3)..(3): 2'-hydroxy corresponding base
  modified_base (4)..(4): 2'-O-methyl corresponding base
  modified_base (5)..(5): 2'-hydroxy corresponding base
  modified_base (6)..(6): 2'-O-methyl corresponding base
  modified_base (7)..(7): 2'-hydroxy corresponding base
  modified_base (8)..(8): 2'-O-methyl corresponding base
  modified_base (9)..(9): 2'-hydroxy corresponding base
  modified_base (10)..(10): 2'-O-methyl corresponding base
  modified_base (11)..(11): 2'-hydroxy corresponding base
  modified_base (12)..(12): 2'-O-methyl corresponding base
  modified_base (13)..(13): 2'-hydroxy corresponding base
  modified_base (14)..(14): 2'-O-methyl corresponding base
  modified_base (15)..(15): 2'-hydroxy corresponding base
  modified_base (16)..(16): 2'-O-methyl corresponding base
  modified_base (17)..(17): 2'-hydroxy corresponding base
  modified_base (18)..(18): 2'-O-methyl corresponding base
  modified_base (19)..(19): 2'-hydroxy corresponding base
  modified_base (20)..(20): deoxythymidine
  modified_base (21)..(21): 5'-thio thymidine
cggcacccucauaggccugtt

SEQ ID NO: 364 - DNA, 21 bp, Artificial Sequence
  Description of Artificial Sequence: Synthetic oligonucleotide
  Description of Combined DNA/RNA Molecule: Synthetic oligonucleotide
  siRNAs to PCSK9
  modified_base (1)..(1): 2'-O-methyl corresponding base
  modified_base (2)..(2): 2'-deoxy-2'-fluoro corresponding base
  modified_base (3)..(3): 2'-O-methyl corresponding base
  modified_base (4)..(4): 2'-deoxy-2'-fluoro corresponding base
  modified_base (5)..(5): 2'-O-methyl corresponding base
  modified_base (6)..(6): 2'-deoxy-2'-fluoro corresponding base
  modified_base (7)..(7): 2'-O-methyl corresponding base
  modified_base (8)..(8): 2'-deoxy-2'-fluoro corresponding base
  modified_base (9)..(9): 2'-O-methyl corresponding base
  modified_base (10)..(10): 2'-deoxy-2'-fluoro corresponding base
  modified_base (11)..(11): 2'-O-methyl corresponding base
  modified_base (12)..(12): 2'-deoxy-2'-fluoro corresponding base
  modified_base (13)..(13): 2'-O-methyl corresponding base
  modified_base (14)..(14): 2'-deoxy-2'-fluoro corresponding base
  modified_base (15)..(15): 2'-O-methyl corresponding base
  modified_base (16)..(16): 2'-deoxy-2'-fluoro corresponding base
  modified_base (17)..(17): 2'-O-methyl corresponding base
  modified_base (18)..(18): 2'-deoxy-2'-fluoro corresponding base
  modified_base (19)..(19): 2'-O-methyl corresponding base
  modified_base (20)..(20): deoxythymidine
  modified_base (21)..(21): 5'-thio thymidine
caggccuaugagggugccgtt

SEQ ID NO: 365 - DNA, 21 bp, Artificial Sequence
  Description of Artificial Sequence: Synthetic oligonucleotide
  Description of Combined DNA/RNA Molecule: Synthetic oligonucleotide
  siRNAs to PCSK9
  modified_base (1)..(1): 2'-hydroxy corresponding base
  modified_base (2)..(2): 2'-O-methyl corresponding base
  modified_base (3)..(3): 2'-hydroxy corresponding base
  modified_base (4)..(4): 2'-O-methyl corresponding base
  modified_base (5)..(5): 2'-hydroxy corresponding base
  modified_base (6)..(6): 2'-O-methyl corresponding base
  modified_base (7)..(7): 2'-hydroxy corresponding base
  modified_base (8)..(8): 2'-O-methyl corresponding base
  modified_base (9)..(9): 2'-hydroxy corresponding base
  modified_base (10)..(10): 2'-O-methyl corresponding base
  modified_base (11)..(11): 2'-hydroxy corresponding base
  modified_base (12)..(12): 2'-O-methyl corresponding base
  modified_base (13)..(13): 2'-hydroxy corresponding base
  modified_base (14)..(14): 2'-O-methyl corresponding base
  modified_base (15)..(15): 2'-hydroxy corresponding base
  modified_base (16)..(16): 2'-O-methyl corresponding base
  modified_base (17)..(17): 2'-hydroxy corresponding base
  modified_base (18)..(18): 2'-O-methyl corresponding base
  modified_base (19)..(19): 2'-hydroxy corresponding base
  modified_base (20)..(20): deoxythymidine
  modified_base (21)..(21): 5'-thio thymidine
cggcacccucauaggccugtt

SEQ ID NO: 366 - DNA, 21 bp, Artificial Sequence
  Description of Artificial Sequence: Synthetic oligonucleotide
  Description of Combined DNA/RNA Molecule: Synthetic oligonucleotide
  siRNAs to PCSK9
  modified_base (1)..(1): 2'-deoxy-2'-fluoro corresponding base
  modified_base (2)..(2): 2'-hydroxy corresponding base
  modified_base (3)..(3): 2'-hydroxy corresponding base
  modified_base (4)..(4): 2'-hydroxy corresponding base
  modified_base (5)..(5): 2'-deoxy-2'-fluoro corresponding base
  modified_base (6)..(6): 2'-deoxy-2'-fluoro corresponding base
  modified_base (7)..(7): 2'-deoxy-2'-fluoro corresponding base
  modified_base (8)..(8): 2'-hydroxy corresponding base
  modified_base (9)..(9): 2'-deoxy-2'-fluoro corresponding base
  modified_base (10)..(10): 2'-hydroxy corresponding base
  modified_base (11)..(11): 2'-hydroxy corresponding base
  modified_base (12)..(12): 2'-hydroxy corresponding base
  modified_base (13)..(13): 2'-hydroxy corresponding base
  modified_base (14)..(14): 2'-hydroxy corresponding base
  modified_base (15)..(15): 2'-deoxy-2'-fluoro corresponding base
  modified_base (16)..(16): 2'-hydroxy corresponding base
  modified_base (17)..(17): 2'-deoxy-2'-fluoro corresponding base
  modified_base (18)..(18): 2'-deoxy-2'-fluoro corresponding base
  modified_base (19)..(19): 2'-hydroxy corresponding base
  modified_base (20)..(20): deoxythymidine
  modified_base (21)..(21): 5'-thio thymidine
caggccuaugagggugccgtt

SEQ ID NO: 367 - DNA, 21 bp, Artificial Sequence
  Description of Artificial Sequence: Synthetic oligonucleotide
  Description of Combined DNA/RNA Molecule: Synthetic oligonucleotide
  siRNAs to PCSK9
  modified_base (1)..(1): 2'-deoxy-2'-fluoro corresponding base
  modified_base (2)..(2): 2'-O-methyl corresponding base
  modified_base (3)..(3): 2'-deoxy-2'-fluoro corresponding base
  modified_base (4)..(4): 2'-O-methyl corresponding base
  modified_base (5)..(5): 2'-deoxy-2'-fluoro corresponding base
  modified_base (6)..(6): 2'-O-methyl corresponding base
  modified_base (7)..(7): 2'-deoxy-2'-fluoro corresponding base
  modified_base (8)..(8): 2'-O-methyl corresponding base
  modified_base (9)..(9): 2'-deoxy-2'-fluoro corresponding base
  modified_base (10)..(10): 2'-O-methyl corresponding base
  modified_base (11)..(11): 2'-deoxy-2'-fluoro corresponding base
  modified_base (12)..(12): 2'-O-methyl corresponding base
  modified_base (13)..(13): 2'-deoxy-2'-fluoro corresponding base
  modified_base (14)..(14): 2'-O-methyl corresponding base
  modified_base (15)..(15): 2'-deoxy-2'-fluoro corresponding base
  modified_base (16)..(16): 2'-O-methyl corresponding base
  modified_base (17)..(17): 2'-deoxy-2'-fluoro corresponding base
  modified_base (18)..(18): 2'-O-methyl corresponding base
  modified_base (19)..(19): 2'-deoxy-2'-fluoro corresponding base
  modified_base (20)..(20): deoxythymidine
  modified_base (21)..(21): 5'-thio thymidine
cggcacccucauaggccugtt

SEQ ID NO: 368 - DNA, 21 bp, Artificial Sequence
  Description of Artificial Sequence: Synthetic oligonucleotide
  Description of Combined DNA/RNA Molecule: Synthetic oligonucleotide
  siRNAs to PCSK9
  modified_base (1)..(1): 2'-hydroxy corresponding base
  modified_base (2)..(2): 2'-hydroxy corresponding base
  modified_base (3)..(3): 2'-hydroxy corresponding base
  modified_base (4)..(4): 2'-hydroxy corresponding base
  modified_base (5)..(5): 2'-hydroxy corresponding base
  modified_base (6)..(6): 2'-O-methyl corresponding base
  modified_base (7)..(7): 2'-O-methyl corresponding base
  modified_base (8)..(8): 2'-hydroxy corresponding base
  modified_base (9)..(9): 2'-hydroxy corresponding base
  modified_base (10)..(10): 2'-O-methyl corresponding base
  modified_base (11)..(11): 2'-O-methyl corresponding base
  modified_base (12)..(12): 2'-hydroxy corresponding base
  modified_base (13)..(13): 2'-hydroxy corresponding base
  modified_base (14)..(14): 2'-hydroxy corresponding base
  modified_base (15)..(15): 2'-hydroxy corresponding base
  modified_base (16)..(16): 2'-hydroxy corresponding base
  modified_base (17)..(17): 2'-O-methyl corresponding base
  modified_base (18)..(18): 2'-O-methyl corresponding base
  modified_base (19)..(19): 2'-O-methyl corresponding base
  modified_base (20)..(20): deoxythymidine
  modified_base (21)..(21): 5'-thio thymidine
caggccuaugagggugccgtt

SEQ ID NO: 369 - DNA, 21 bp, Artificial Sequence
  Description of Artificial Sequence: Synthetic oligonucleotide
  Description of Combined DNA/RNA Molecule: Synthetic oligonucleotide
  siRNAs to PCSK9
  modified_base (1)..(1): 2'-deoxy-2'-fluoro corresponding base
  modified_base (2)..(2): 2'-hydroxy corresponding base
  modified_base (3)..(3): 2'-hydroxy corresponding base
  modified_base (4)..(4): 2'-deoxy-2'-fluoro corresponding base
  modified_base (5)..(5): 2'-hydroxy corresponding base
  modified_base (6)..(6): 2'-deoxy-2'-fluoro corresponding base
  modified_base (7)..(7): 2'-deoxy-2'-fluoro corresponding base
  modified_base (8)..(8): 2'-deoxy-2'-fluoro corresponding base
  modified_base (9)..(9): 2'-deoxy-2'-fluoro corresponding base
  modified_base (10)..(10): 2'-deoxy-2'-fluoro corresponding base
  modified_base (11)..(11): 2'-hydroxy corresponding base
  modified_base (12)..(12): 2'-deoxy-2'-fluoro corresponding base
  modified_base (13)..(13): 2'-hydroxy corresponding base
  modified_base (14)..(14): 2'-hydroxy corresponding base
  modified_base (15)..(15): 2'-hydroxy corresponding base
  modified_base (16)..(16): 2'-deoxy-2'-fluoro corresponding base
  modified_base (17)..(17): 2'-deoxy-2'-fluoro corresponding base
  modified_base (18)..(18): 2'-deoxy-2'-fluoro corresponding base
  modified_base (19)..(19): 2'-hydroxy corresponding base
  modified_base (20)..(20): deoxythymidine
  modified_base (21)..(21): 5'-thio thymidine
cggcacccucauaggccugtt

SEQ ID NO: 370 - DNA, 21 bp, Artificial Sequence
  Description of Artificial Sequence: Synthetic oligonucleotide
  Description of Combined DNA/RNA Molecule: Synthetic oligonucleotide
  siRNAs to PCSK9
  modified_base (1)..(1): 2'-hydroxy corresponding base
  modified_base (2)..(2): 2'-hydroxy corresponding base
  modified_base (3)..(3): 2'-hydroxy corresponding base
  modified_base (4)..(4): 2'-hydroxy corresponding base
  modified_base (5)..(5): 2'-hydroxy corresponding base
  modified_base (6)..(6): 2'-O-methyl corresponding base
  modified_base (7)..(7): 2'-O-methyl corresponding base
  modified_base (8)..(8): 2'-hydroxy corresponding base
  modified_base (9)..(9): 2'-hydroxy corresponding base
  modified_base (10)..(10): 2'-O-methyl corresponding base
  modified_base (11)..(11): 2'-O-methyl corresponding base
  modified_base (12)..(12): 2'-hydroxy corresponding base
  modified_base (13)..(13): 2'-hydroxy corresponding base
  modified_base (14)..(14): 2'-hydroxy corresponding base
  modified_base (15)..(15): 2'-hydroxy corresponding base
  modified_base (16)..(16): 2'-hydroxy corresponding base
  modified_base (17)..(17): 2'-O-methyl corresponding base
  modified_base (18)..(18): 2'-O-methyl corresponding base
  modified_base (19)..(19): 2'-O-methyl corresponding base
  modified_base (20)..(20): deoxythymidine
  modified_base (21)..(21): 5'-thio thymidine
caggccuaugagggugccgtt

SEQ ID NO: 371 - DNA, 21 bp, Artificial Sequence
  Description of Artificial Sequence: Synthetic oligonucleotide
  Description of Combined DNA/RNA Molecule: Synthetic oligonucleotide
  siRNAs to PCSK9
  modified_base (1)..(1): 2'-hydroxy corresponding base
  modified_base (2)..(2): 2'-O-methyl corresponding base
  modified_base (3)..(3): 2'-hydroxy corresponding base
  modified_base (4)..(4): 2'-O-methyl corresponding base
  modified_base (5)..(5): 2'-hydroxy corresponding base
  modified_base (6)..(6): 2'-O-methyl corresponding base
  modified_base (7)..(7): 2'-hydroxy corresponding base
  modified_base (8)..(8): 2'-O-methyl corresponding base
  modified_base (9)..(9): 2'-hydroxy corresponding base
  modified_base (10)..(10): 2'-O-methyl corresponding base
  modified_base (11)..(11): 2'-hydroxy corresponding base
  modified_base (12)..(12): 2'-O-methyl corresponding base
  modified_base (13)..(13): 2'-hydroxy corresponding base
  modified_base (14)..(14): 2'-O-methyl corresponding base
  modified_base (15)..(15): 2'-hydroxy corresponding base
  modified_base (16)..(16): 2'-O-methyl corresponding base
  modified_base (17)..(17): 2'-hydroxy corresponding base
  modified_base (18)..(18): 2'-O-methyl corresponding base
  modified_base (19)..(19): 2'-hydroxy corresponding base
  modified_base (20)..(20): deoxythymidine
  modified_base (21)..(21): 5'-thio thymidine
cggcacccucauaggccugtt

SEQ ID NO: 372 - DNA, 21 bp, Artificial Sequence
  Description of Artificial Sequence: Synthetic oligonucleotide
  Description of Combined DNA/RNA Molecule: Synthetic oligonucleotide
  siRNAs to PCSK9
  modified_base (1)..(1): 2'-hydroxy corresponding base
  modified_base (2)..(2): 2'-hydroxy corresponding base
  modified_base (3)..(3): 2'-hydroxy corresponding base
  modified_base (4)..(4): 2'-hydroxy corresponding base
  modified_base (5)..(5): 2'-hydroxy corresponding base
  modified_base (6)..(6): 2'-O-methyl corresponding base
  modified_base (7)..(7): 2'-O-methyl corresponding base
  modified_base (8)..(8): 2'-hydroxy corresponding base
  modified_base (9)..(9): 2'-hydroxy corresponding base
  modified_base (10)..(10): 2'-O-methyl corresponding base
  modified_base (11)..(11): 2'-O-methyl corresponding base
  modified_base (12)..(12): 2'-hydroxy corresponding base
  modified_base (13)..(13): 2'-hydroxy corresponding base
  modified_base (14)..(14): 2'-hydroxy corresponding base
  modified_base (15)..(15): 2'-hydroxy corresponding base
  modified_base (16)..(16): 2'-hydroxy corresponding base
  modified_base (17)..(17): 2'-O-methyl corresponding base
  modified_base (18)..(18): 2'-O-methyl corresponding base
  modified_base (19)..(19): 2'-O-methyl corresponding base
  modified_base (20)..(20): deoxythymidine
  modified_base (21)..(21): 5'-thio thymidine
caggccuaugagggugccgtt

SEQ ID NO: 373 - DNA, 21 bp, Artificial Sequence
  Description of Artificial Sequence: Synthetic oligonucleotide
  Description of Combined DNA/RNA Molecule: Synthetic oligonucleotide
  siRNAs to PCSK9
  modified_base (1)..(1): 2'-hydroxy corresponding base
  modified_base (2)..(2): 2'-hydroxy corresponding base
  modified_base (3)..(3): 2'-hydroxy corresponding base
  modified_base (4)..(4): 2'-hydroxy corresponding base
  modified_base (5)..(5): 2'-hydroxy corresponding base
  modified_base (6)..(6): 2'-hydroxy corresponding base
  modified_base (7)..(7): 2'-hydroxy corresponding base
  modified_base (8)..(8): 2'-hydroxy corresponding base
  modified_base (9)..(9): 2'-hydroxy corresponding base
  modified_base (10)..(10): 2'-hydroxy corresponding base
  modified_base (11)..(11): 2'-hydroxy corresponding base
  modified_base (12)..(12): 2'-hydroxy corresponding base
  modified_base (13)..(13): 2'-hydroxy corresponding base
  modified_base (14)..(14): 2'-hydroxy corresponding base
  modified_base (15)..(15): 2'-hydroxy corresponding base
  modified_base (16)..(16): 2'-hydroxy corresponding base
  modified_base (17)..(17): 2'-hydroxy corresponding base
  modified_base (18)..(18): 2'-hydroxy corresponding base
  modified_base (19)..(19): 2'-hydroxy corresponding base
  modified_base (20)..(20): deoxythymidine
  modified_base (21)..(21): 5'-thio thymidine
aucgagggcagggucauggtt

SEQ ID NO: 374 - DNA, 21 bp, Artificial Sequence
  Description of Artificial Sequence: Synthetic oligonucleotide
  Description of Combined DNA/RNA Molecule: Synthetic oligonucleotide
  siRNAs to PCSK9
  modified_base (1)..(1): 2'-hydroxy corresponding base
  modified_base (2)..(2): 2'-hydroxy corresponding base
  modified_base (3)..(3): 2'-hydroxy corresponding base
  modified_base (4)..(4): 2'-hydroxy corresponding base
  modified_base (5)..(5): 2'-hydroxy corresponding base
  modified_base (6)..(6): 2'-hydroxy corresponding base
  modified_base (7)..(7): 2'-hydroxy corresponding base
  modified_base (8)..(8): 2'-hydroxy corresponding base
  modified_base (9)..(9): 2'-hydroxy corresponding base
  modified_base (10)..(10): 2'-hydroxy corresponding base
  modified_base (11)..(11): 2'-hydroxy corresponding base
  modified_base (12)..(12): 2'-hydroxy corresponding base
  modified_base (13)..(13): 2'-hydroxy corresponding base
  modified_base (14)..(14): 2'-hydroxy corresponding base
  modified_base (15)..(15): 2'-hydroxy corresponding base
  modified_base (16)..(16): 2'-hydroxy corresponding base
  modified_base (17)..(17): 2'-hydroxy corresponding base
  modified_base (18)..(18): 2'-hydroxy corresponding base
  modified_base (19)..(19): 2'-hydroxy corresponding base
  modified_base (20)..(20): deoxythymidine
  modified_base (21)..(21): 5'-thio thymidine
ccaugacccugcccucgautt

SEQ ID NO: 375 - DNA, 21 bp, Artificial Sequence
  Description of Artificial Sequence: Synthetic oligonucleotide
  Description of Combined DNA/RNA Molecule: Synthetic oligonucleotide
  siRNAs to PCSK9
  modified_base (1)..(1): 2'-hydroxy corresponding base
  modified_base (2)..(2): 2'-O-methyl corresponding base
  modified_base (3)..(3): 2'-O-methyl corresponding base
  modified_base (4)..(4): 2'-hydroxy corresponding base
  modified_base (5)..(5): 2'-hydroxy corresponding base
  modified_base (6)..(6): 2'-hydroxy corresponding base
  modified_base (7)..(7): 2'-hydroxy corresponding base
  modified_base (8)..(8): 2'-hydroxy corresponding base
  modified_base (9)..(9): 2'-O-methyl corresponding base
  modified_base (10)..(10): 2'-hydroxy corresponding base
  modified_base (11)..(11): 2'-hydroxy corresponding base
  modified_base (12)..(12): 2'-hydroxy corresponding base
  modified_base (13)..(13): 2'-hydroxy corresponding base
  modified_base (14)..(14): 2'-O-methyl corresponding base
  modified_base (15)..(15): 2'-O-methyl corresponding base
  modified_base (16)..(16): 2'-hydroxy corresponding base
  modified_base (17)..(17): 2'-O-methyl corresponding base
  modified_base (18)..(18): 2'-hydroxy corresponding base
  modified_base (19)..(19): 2'-hydroxy corresponding base
  modified_base (20)..(20): deoxythymidine
  modified_base (21)..(21): 5'-thio thymidine
aucgagggcagggucauggtt

SEQ ID NO: 376 - DNA, 21 bp, Artificial Sequence
  Description of Artificial Sequence: Synthetic oligonucleotide
  Description of Combined DNA/RNA Molecule: Synthetic oligonucleotide
  siRNAs to PCSK9
  modified_base (1)..(1): 2'-hydroxy corresponding base
  modified_base (2)..(2): 2'-O-methyl corresponding base
  modified_base (3)..(3): 2'-hydroxy corresponding base
  modified_base (4)..(4): 2'-hydroxy corresponding base
  modified_base (5)..(5): 2'-hydroxy corresponding base
  modified_base (6)..(6): 2'-hydroxy corresponding base
  modified_base (7)..(7): 2'-hydroxy corresponding base
  modified_base (8)..(8): 2'-hydroxy corresponding base
  modified_base (9)..(9): 2'-hydroxy corresponding base
  modified_base (10)..(10): 2'-hydroxy corresponding base
  modified_base (11)..(11): 2'-hydroxy corresponding base
  modified_base (12)..(12): 2'-hydroxy corresponding base
  modified_base (13)..(13): 2'-hydroxy corresponding base
  modified_base (14)..(14): 2'-hydroxy corresponding base
  modified_base (15)..(15): 2'-hydroxy corresponding base
  modified_base (16)..(16): 2'-hydroxy corresponding base
  modified_base (17)..(17): 2'-hydroxy corresponding base
  modified_base (18)..(18): 2'-hydroxy corresponding base
  modified_base (19)..(19): 2'-hydroxy corresponding base
  modified_base (20)..(20): deoxythymidine
  modified_base (21)..(21): 5'-thio thymidine
ccaugacccugcccucgautt

SEQ ID NO: 377 - DNA, 21 bp, Artificial Sequence
  Description of Artificial Sequence: Synthetic oligonucleotide
  Description of Combined DNA/RNA Molecule: Synthetic oligonucleotide
  siRNAs to PCSK9
  modified_base (1)..(1): 2'-O-methyl corresponding base
  modified_base (2)..(2): 2'-hydroxy corresponding base
  modified_base (3)..(3): 2'-hydroxy corresponding base
  modified_base (4)..(4): 2'-hydroxy corresponding base
  modified_base (5)..(5): 2'-hydroxy corresponding base
  modified_base (6)..(6): 2'-hydroxy corresponding base
  modified_base (7)..(7): 2'-O-methyl corresponding base
  modified_base (8)..(8): 2'-hydroxy corresponding base
  modified_base (9)..(9): 2'-hydroxy corresponding base
  modified_base (10)..(10): 2'-hydroxy corresponding base
  modified_base (11)..(11): 2'-hydroxy corresponding base
  modified_base (12)..(12): 2'-O-methyl corresponding base
  modified_base (13)..(13): 2'-O-methyl corresponding base
  modified_base (14)..(14): 2'-hydroxy corresponding base
  modified_base (15)..(15): 2'-O-methyl corresponding base
  modified_base (16)..(16): 2'-hydroxy corresponding base
  modified_base (17)..(17): 2'-hydroxy corresponding base
  modified_base (18)..(18): 2'-O-methyl corresponding base
  modified_base (19)..(19): 2'-O-methyl corresponding base
  modified_base (20)..(20): deoxythymidine
  modified_base (21)..(21): 5'-thio thymidine
cgagggcagggucaugguctt

SEQ ID NO: 378 - DNA, 21 bp, Artificial Sequence
  Description of Artificial Sequence: Synthetic oligonucleotide
  Description of Combined DNA/RNA Molecule: Synthetic oligonucleotide
  siRNAs to PCSK9
  modified_base (1)..(1): 2'-hydroxy corresponding base
  modified_base (2)..(2): 2'-hydroxy corresponding base
  modified_base (3)..(3): 2'-hydroxy corresponding base
  modified_base (4)..(4): 2'-O-methyl corresponding base
  modified_base (5)..(5): 2'-hydroxy corresponding base
  modified_base (6)..(6): 2'-hydroxy corresponding base
  modified_base (7)..(7): 2'-hydroxy corresponding base
  modified_base (8)..(8): 2'-hydroxy corresponding base
  modified_base (9)..(9): 2'-hydroxy corresponding base
  modified_base (10)..(10): 2'-hydroxy corresponding base
  modified_base (11)..(11): 2'-hydroxy corresponding base
  modified_base (12)..(12): 2'-hydroxy corresponding base
  modified_base (13)..(13): 2'-hydroxy corresponding base
  modified_base (14)..(14): 2'-hydroxy corresponding base
  modified_base (15)..(15): 2'-hydroxy corresponding base
  modified_base (16)..(16): 2'-hydroxy corresponding base
  modified_base (17)..(17): 2'-hydroxy corresponding base
  modified_base (18)..(18): 2'-hydroxy corresponding base
  modified_base (19)..(19): 2'-hydroxy corresponding base
  modified_base (20)..(20): deoxythymidine
  modified_base (21)..(21): 5'-thio thymidine
gaccaugacccugcccucgtt

SEQ ID NO: 379 - DNA, 21 bp, Artificial Sequence
  Description of Artificial Sequence: Synthetic oligonucleotide
  Description of Combined DNA/RNA Molecule: Synthetic oligonucleotide
  siRNAs to PCSK9
  modified_base (1)..(1): 2'-hydroxy corresponding base
  modified_base (2)..(2): 2'-hydroxy corresponding base
  modified_base (3)..(3): 2'-hydroxy corresponding base
  modified_base (4)..(4): 2'-hydroxy corresponding base
  modified_base (5)..(5): 2'-hydroxy corresponding base
  modified_base (6)..(6): 2'-hydroxy corresponding base
  modified_base (7)..(7): 2'-hydroxy corresponding base
  modified_base (8)..(8): 2'-hydroxy corresponding base
  modified_base (9)..(9): 2'-hydroxy corresponding base
  modified_base (10)..(10): 2'-hydroxy corresponding base
  modified_base (11)..(11): 2'-hydroxy corresponding base
  modified_base (12)..(12): 2'-hydroxy corresponding base
  modified_base (13)..(13): 2'-hydroxy corresponding base
  modified_base (14)..(14): 2'-hydroxy corresponding base
  modified_base (15)..(15): 2'-hydroxy corresponding base
  modified_base (16)..(16): 2'-hydroxy corresponding base
  modified_base (17)..(17): 2'-hydroxy corresponding base
  modified_base (18)..(18): 2'-hydroxy corresponding base
  modified_base (19)..(19): 2'-hydroxy corresponding base
  modified_base (20)..(20): deoxythymidine
  modified_base (21)..(21): 5'-thio thymidine
gagggcagggucauggucatt

SEQ ID NO: 380 - DNA, 21 bp, Artificial Sequence
  Description of Artificial Sequence: Synthetic oligonucleotide
  Description of Combined DNA/RNA Molecule: Synthetic oligonucleotide
  siRNAs to PCSK9
  modified_base (1)..(1): 2'-hydroxy corresponding base
  modified_base (2)..(2): 2'-hydroxy corresponding base
  modified_base (3)..(3): 2'-hydroxy corresponding base
  modified_base (4)..(4): 2'-hydroxy corresponding base
  modified_base (5)..(5): 2'-hydroxy corresponding base
  modified_base (6)..(6): 2'-hydroxy corresponding base
  modified_base (7)..(7): 2'-hydroxy corresponding base
  modified_base (8)..(8): 2'-hydroxy corresponding base
  modified_base (9)..(9): 2'-hydroxy corresponding base
  modified_base (10)..(10): 2'-hydroxy corresponding base
  modified_base (11)..(11): 2'-hydroxy corresponding base
  modified_base (12)..(12): 2'-hydroxy corresponding base
  modified_base (13)..(13): 2'-hydroxy corresponding base
  modified_base (14)..(14): 2'-hydroxy corresponding base
  modified_base (15)..(15): 2'-hydroxy corresponding base
  modified_base (16)..(16): 2'-hydroxy corresponding base
  modified_base (17)..(17): 2'-hydroxy corresponding base
  modified_base (18)..(18): 2'-hydroxy corresponding base
  modified_base (19)..(19): 2'-hydroxy corresponding base
  modified_base (20)..(20): deoxythymidine
  modified_base (21)..(21): 5'-thio thymidine
ugaccaugacccugcccuctt

SEQ ID NO: 381 - DNA, 21 bp, Artificial Sequence
  Description of Artificial Sequence: Synthetic oligonucleotide
  Description of Combined DNA/RNA Molecule: Synthetic oligonucleotide
  siRNAs to PCSK9
  modified_base (1)..(1): 2'-hydroxy corresponding base
  modified_base (2)..(2): 2'-hydroxy corresponding base
  modified_base (3)..(3): 2'-hydroxy corresponding base
  modified_base (4)..(4): 2'-hydroxy corresponding base
  modified_base (5)..(5): 2'-hydroxy corresponding base
  modified_base (6)..(6): 2'-O-methyl corresponding base
  modified_base (7)..(7): 2'-hydroxy corresponding base
  modified_base (8)..(8): 2'-hydroxy corresponding base
  modified_base (9)..(9): 2'-hydroxy corresponding base
  modified_base (10)..(10): 2'-hydroxy corresponding base
  modified_base (11)..(11): 2'-O-methyl corresponding base
  modified_base (12)..(12): 2'-O-methyl corresponding base
  modified_base (13)..(13): 2'-hydroxy corresponding base
  modified_base (14)..(14): 2'-O-methyl corresponding base
  modified_base (15)..(15): 2'-hydroxy corresponding base
  modified_base (16)..(16): 2'-hydroxy corresponding base
  modified_base (17)..(17): 2'-O-methyl corresponding base
  modified_base (18)..(18): 2'-O-methyl corresponding base
  modified_base (19)..(19): 2'-hydroxy corresponding base
  modified_base (20)..(20): deoxythymidine
  modified_base (21)..(21): 5'-thio thymidine
gagggcagggucauggucatt

SEQ ID NO: 382 - DNA, 21 bp, Artificial Sequence
  Description of Artificial Sequence: Synthetic oligonucleotide
  Description of Combined DNA/RNA Molecule: Synthetic oligonucleotide
  siRNAs to PCSK9
  modified_base (1)..(1): 2'-hydroxy corresponding base
  modified_base (2)..(2): 2'-hydroxy corresponding base
  modified_base (3)..(3): 2'-hydroxy corresponding base
  modified_base (4)..(4): 2'-hydroxy corresponding base
  modified_base (5)..(5): 2'-O-methyl corresponding base
  modified_base (6)..(6): 2'-hydroxy corresponding base
  modified_base (7)..(7): 2'-hydroxy corresponding base
  modified_base (8)..(8): 2'-hydroxy corresponding base
  modified_base (9)..(9): 2'-hydroxy corresponding base
  modified_base (10)..(10): 2'-hydroxy corresponding base
  modified_base (11)..(11): 2'-hydroxy corresponding base
  modified_base (12)..(12): 2'-hydroxy corresponding base
  modified_base (13)..(13): 2'-hydroxy corresponding base
  modified_base (14)..(14): 2'-hydroxy corresponding base
  modified_base (15)..(15): 2'-hydroxy corresponding base
  modified_base (16)..(16): 2'-hydroxy corresponding base
  modified_base (17)..(17): 2'-hydroxy corresponding base
  modified_base (18)..(18): 2'-hydroxy corresponding base
  modified_base (19)..(19): 2'-hydroxy corresponding base
  modified_base (20)..(20): deoxythymidine
  modified_base (21)..(21): 5'-thio thymidine
ugaccaugacccugcccuctt

SEQ ID NO: 383 - DNA, 21 bp, Artificial Sequence
  Description of Artificial Sequence: Synthetic oligonucleotide
  Description of Combined DNA/RNA Molecule: Synthetic oligonucleotide
  siRNAs to PCSK9
  modified_base (1)..(1): 2'-hydroxy corresponding base
  modified_base (2)..(2): 2'-hydroxy corresponding base
  modified_base (3)..(3): 2'-hydroxy corresponding base
  modified_base (4)..(4): 2'-hydroxy corresponding base
  modified_base (5)..(5): 2'-hydroxy corresponding base
  modified_base (6)..(6): 2'-hydroxy corresponding base
  modified_base (7)..(7): 2'-hydroxy corresponding base
  modified_base (8)..(8): 2'-hydroxy corresponding base
  modified_base (9)..(9): 2'-hydroxy corresponding base
  modified_base (10)..(10): 2'-hydroxy corresponding base
  modified_base (11)..(11): 2'-hydroxy corresponding base
  modified_base (12)..(12): 2'-hydroxy corresponding base
  modified_base (13)..(13): 2'-hydroxy corresponding base
  modified_base (14)..(14): 2'-hydroxy corresponding base
  modified_base (15)..(15): 2'-hydroxy corresponding base
  modified_base (16)..(16): 2'-hydroxy corresponding base
  modified_base (17)..(17): 2'-hydroxy corresponding base
  modified_base (18)..(18): 2'-hydroxy corresponding base
  modified_base (19)..(19): 2'-hydroxy corresponding base
  modified_base (20)..(20): deoxythymidine
  modified_base (21)..(21): 5'-thio thymidine
gggcagggucauggucacctt

SEQ ID NO: 384 - DNA, 21 bp, Artificial Sequence
  Description of Artificial Sequence: Synthetic oligonucleotide
  Description of Combined DNA/RNA Molecule: Synthetic oligonucleotide
  siRNAs to PCSK9
  modified_base (1)..(1): 2'-hydroxy corresponding base
  modified_base (2)..(2): 2'-hydroxy corresponding base
  modified_base (3)..(3): 2'-hydroxy corresponding base
  modified_base (4)..(4): 2'-hydroxy corresponding base
  modified_base (5)..(5): 2'-hydroxy corresponding base
  modified_base (6)..(6): 2'-hydroxy corresponding base
  modified_base (7)..(7): 2'-hydroxy corresponding base
  modified_base (8)..(8): 2'-hydroxy corresponding base
  modified_base (9)..(9): 2'-hydroxy corresponding base
  modified_base (10)..(10): 2'-hydroxy corresponding base
  modified_base (11)..(11): 2'-hydroxy corresponding base
  modified_base (12)..(12): 2'-hydroxy corresponding base
  modified_base (13)..(13): 2'-hydroxy corresponding base
  modified_base (14)..(14): 2'-hydroxy corresponding base
  modified_base (15)..(15): 2'-hydroxy corresponding base
  modified_base (16)..(16): 2'-hydroxy corresponding base
  modified_base (17)..(17): 2'-hydroxy corresponding base
  modified_base (18)..(18): 2'-hydroxy corresponding base
  modified_base (19)..(19): 2'-hydroxy corresponding base
  modified_base (20)..(20): deoxythymidine
  modified_base (21)..(21): 5'-thio thymidine
ggugaccaugacccugccctt

SEQ ID NO: 385 - DNA, 21 bp, Artificial Sequence
  Description of Artificial Sequence: Synthetic oligonucleotide
  Description of Combined DNA/RNA Molecule: Synthetic oligonucleotide
  siRNAs to PCSK9
  modified_base (1)..(1): 2'-hydroxy corresponding base
  modified_base (2)..(2): 2'-hydroxy corresponding base
  modified_base (3)..(3): 2'-hydroxy corresponding base
  modified_base (4)..(4): 2'-O-methyl corresponding base
  modified_base (5)..(5): 2'-hydroxy corresponding base
  modified_base (6)..(6): 2'-hydroxy corresponding base
  modified_base (7)..(7): 2'-hydroxy corresponding base
  modified_base (8)..(8): 2'-hydroxy corresponding base
  modified_base (9)..(9): 2'-O-methyl corresponding base
  modified_base (10)..(10): 2'-O-methyl corresponding base
  modified_base (11)..(11): 2'-hydroxy corresponding base
  modified_base (12)..(12): 2'-O-methyl corresponding base
  modified_base (13)..(13): 2'-hydroxy corresponding base
  modified_base (14)..(14): 2'-hydroxy corresponding base
  modified_base (15)..(15): 2'-O-methyl corresponding base
  modified_base (16)..(16): 2'-O-methyl corresponding base
  modified_base (17)..(17): 2'-hydroxy corresponding base
  modified_base (18)..(18): 2'-O-methyl corresponding base
  modified_base (19)..(19): 2'-O-methyl corresponding base
  modified_base (20)..(20): deoxythymidine
  modified_base (21)..(21): 5'-thio thymidine
gggcagggucauggucacctt

SEQ ID NO: 386 - DNA, 21 bp, Artificial Sequence
  Description of Artificial Sequence: Synthetic oligonucleotide
  Description of Combined DNA/RNA Molecule: Synthetic oligonucleotide
  siRNAs to PCSK9
  modified_base (1)..(1): 2'-hydroxy corresponding base
  modified_base (2)..(2): 2'-hydroxy corresponding base
  modified_base (3)..(3): 2'-hydroxy corresponding base
  modified_base (4)..(4): 2'-hydroxy corresponding base
  modified_base (5)..(5): 2'-hydroxy corresponding base
  modified_base (6)..(6): 2'-hydroxy corresponding base
  modified_base (7)..(7): 2'-O-methyl corresponding base
  modified_base (8)..(8): 2'-hydroxy corresponding base
  modified_base (9)..(9): 2'-hydroxy corresponding base
  modified_base (10)..(10): 2'-hydroxy corresponding base
  modified_base (11)..(11): 2'-hydroxy corresponding base
  modified_base (12)..(12): 2'-hydroxy corresponding base
  modified_base (13)..(13): 2'-hydroxy corresponding base
  modified_base (14)..(14): 2'-hydroxy corresponding base
  modified_base (15)..(15): 2'-hydroxy corresponding base
  modified_base (16)..(16): 2'-hydroxy corresponding base
  modified_base (17)..(17): 2'-hydroxy corresponding base
  modified_base (18)..(18): 2'-hydroxy corresponding base
  modified_base (19)..(19): 2'-hydroxy corresponding base
  modified_base (20)..(20): deoxythymidine
  modified_base (21)..(21): 5'-thio thymidine
ggugaccaugacccugccctt

SEQ ID NO: 387 - DNA, 21 bp, Artificial Sequence
  Description of Artificial Sequence: Synthetic oligonucleotide
  Description of Combined DNA/RNA Molecule: Synthetic oligonucleotide
  siRNAs to PCSK9
  modified_base (1)..(1): 2'-hydroxy corresponding base
  modified_base (2)..(2): 2'-hydroxy corresponding base
  modified_base (3)..(3): 2'-hydroxy corresponding base
  modified_base (4)..(4): 2'-hydroxy corresponding base
  modified_base (5)..(5): 2'-hydroxy corresponding base
  modified_base (6)..(6): 2'-hydroxy corresponding base
  modified_base (7)..(7): 2'-hydroxy corresponding base
  modified_base (8)..(8): 2'-hydroxy corresponding base
  modified_base (9)..(9): 2'-hydroxy corresponding base
  modified_base (10)..(10): 2'-hydroxy corresponding base
  modified_base (11)..(11): 2'-hydroxy corresponding base
  modified_base (12)..(12): 2'-hydroxy corresponding base
  modified_base (13)..(13): 2'-hydroxy corresponding base
  modified_base (14)..(14): 2'-hydroxy corresponding base
  modified_base (15)..(15): 2'-hydroxy corresponding base
  modified_base (16)..(16): 2'-hydroxy corresponding base
  modified_base (17)..(17): 2'-hydroxy corresponding base
  modified_base (18)..(18): 2'-hydroxy corresponding base
  modified_base (19)..(19): 2'-hydroxy corresponding base
  modified_base (20)..(20): deoxythymidine
  modified_base (21)..(21): 5'-thio thymidine
cagggucauggucaccgactt

SEQ ID NO: 388 - DNA, 21 bp, Artificial Sequence
  Description of Artificial Sequence: Synthetic oligonucleotide
  Description of Combined DNA/RNA Molecule: Synthetic oligonucleotide
  siRNAs to PCSK9
  modified_base (1)..(1): 2'-hydroxy corresponding base
  modified_base (2)..(2): 2'-hydroxy corresponding base
  modified_base (3)..(3): 2'-hydroxy corresponding base
  modified_base (4)..(4): 2'-hydroxy corresponding base
  modified_base (5)..(5): 2'-hydroxy corresponding base
  modified_base (6)..(6): 2'-hydroxy corresponding base
  modified_base (7)..(7): 2'-hydroxy corresponding base
  modified_base (8)..(8): 2'-hydroxy corresponding base
  modified_base (9)..(9): 2'-hydroxy corresponding base
  modified_base (10)..(10): 2'-hydroxy corresponding base
  modified_base (11)..(11): 2'-hydroxy corresponding base
  modified_base (12)..(12): 2'-hydroxy corresponding base
  modified_base (13)..(13): 2'-hydroxy corresponding base
  modified_base (14)..(14): 2'-hydroxy corresponding base
  modified_base (15)..(15): 2'-hydroxy corresponding base
  modified_base (16)..(16): 2'-hydroxy corresponding base
  modified_base (17)..(17): 2'-hydroxy corresponding base
  modified_base (18)..(18): 2'-hydroxy corresponding base
  modified_base (19)..(19): 2'-hydroxy corresponding base
  modified_base (20)..(20): deoxythymidine
  modified_base (21)..(21): 5'-thio thymidine
gucggugaccaugacccugtt

SEQ ID NO: 389 - DNA, 21 bp, Artificial Sequence
  Description of Artificial Sequence: Synthetic oligonucleotide
  Description of Combined DNA/RNA Molecule: Synthetic oligonucleotide
  siRNAs to PCSK9
  modified_base (1)..(1): 2'-O-methyl corresponding base
  modified_base (2)..(2): 2'-hydroxy corresponding base
  modified_base (3)..(3): 2'-hydroxy corresponding base
  modified_base (4)..(4): 2'-hydroxy corresponding base
  modified_base (5)..(5): 2'-hydroxy corresponding base
  modified_base (6)..(6): 2'-O-methyl corresponding base
  modified_base (7)..(7): 2'-O-methyl corresponding base
  modified_base (8)..(8): 2'-hydroxy corresponding base
  modified_base (9)..(9): 2'-O-methyl corresponding base
  modified_base (10)..(10): 2'-hydroxy corresponding base
  modified_base (11)..(11): 2'-hydroxy corresponding base
  modified_base (12)..(12): 2'-O-methyl corresponding base
  modified_base (13)..(13): 2'-O-methyl corresponding base
  modified_base (14)..(14): 2'-hydroxy corresponding base
  modified_base (15)..(15): 2'-O-methyl corresponding base
  modified_base (16)..(16): 2'-O-methyl corresponding base
  modified_base (17)..(17): 2'-hydroxy corresponding base
  modified_base (18)..(18): 2'-hydroxy corresponding base
  modified_base (19)..(19): 2'-O-methyl corresponding base
  modified_base (20)..(20): deoxythymidine
  modified_base (21)..(21): 5'-thio thymidine
cagggucauggucaccgactt

SEQ ID NO: 390 - DNA, 21 bp, Artificial Sequence
  Description of Artificial Sequence: Synthetic oligonucleotide
  Description of Combined DNA/RNA Molecule: Synthetic oligonucleotide
  siRNAs to PCSK9
  modified_base (1)..(1): 2'-hydroxy corresponding base
  modified_base (2)..(2): 2'-hydroxy corresponding base
  modified_base (3)..(3): 2'-hydroxy corresponding base
  modified_base (4)..(4): 2'-hydroxy corresponding base
  modified_base (5)..(5): 2'-hydroxy corresponding base
  modified_base (6)..(6): 2'-hydroxy corresponding base
  modified_base (7)..(7): 2'-hydroxy corresponding base
  modified_base (8)..(8): 2'-hydroxy corresponding base
  modified_base (9)..(9): 2'-hydroxy corresponding base
  modified_base (10)..(10): 2'-O-methyl corresponding base
  modified_base (11)..(11): 2'-hydroxy corresponding base
  modified_base (12)..(12): 2'-hydroxy corresponding base
  modified_base (13)..(13): 2'-hydroxy corresponding base
  modified_base (14)..(14): 2'-hydroxy corresponding base
  modified_base (15)..(15): 2'-hydroxy corresponding base
  modified_base (16)..(16): 2'-hydroxy corresponding base
  modified_base (17)..(17): 2'-hydroxy corresponding base
  modified_base (18)..(18): 2'-hydroxy corresponding base
  modified_base (19)..(19): 2'-hydroxy corresponding base
  modified_base (20)..(20): deoxythymidine
  modified_base (21)..(21): 5'-thio thymidine
gucggugaccaugacccugtt

SEQ ID NO: 391 - DNA, 21 bp, Artificial Sequence
  Description of Artificial Sequence: Synthetic oligonucleotide
  Description of Combined DNA/RNA Molecule: Synthetic oligonucleotide
  siRNAs to PCSK9
  modified_base (1)..(1): 2'-hydroxy corresponding base
  modified_base (2)..(2): 2'-hydroxy corresponding base
  modified_base (3)..(3): 2'-hydroxy corresponding base
  modified_base (4)..(4): 2'-hydroxy corresponding base
  modified_base (5)..(5): 2'-hydroxy corresponding base
  modified_base (6)..(6): 2'-hydroxy corresponding base
  modified_base (7)..(7): 2'-hydroxy corresponding base
  modified_base (8)..(8): 2'-hydroxy corresponding base
  modified_base (9)..(9): 2'-hydroxy corresponding base
  modified_base (10)..(10): 2'-hydroxy corresponding base
  modified_base (11)..(11): 2'-hydroxy corresponding base
  modified_base (12)..(12): 2'-hydroxy corresponding base
  modified_base (13)..(13): 2'-hydroxy corresponding base
  modified_base (14)..(14): 2'-hydroxy corresponding base
  modified_base (15)..(15): 2'-hydroxy corresponding base
  modified_base (16)..(16): 2'-hydroxy corresponding base
  modified_base (17)..(17): 2'-hydroxy corresponding base
  modified_base (18)..(18): 2'-hydroxy corresponding base
  modified_base (19)..(19): 2'-hydroxy corresponding base
  modified_base (20)..(20): deoxythymidine
  modified_base (21)..(21): 5'-thio thymidine
agggucauggucaccgacutt

SEQ ID NO: 392 - DNA, 21 bp, Artificial Sequence
  Description of Artificial Sequence: Synthetic oligonucleotide
  Description of Combined DNA/RNA Molecule: Synthetic oligonucleotide
  siRNAs to PCSK9
  modified_base (1)..(1): 2'-hydroxy corresponding base
  modified_base (2)..(2): 2'-hydroxy corresponding base
  modified_base (3)..(3): 2'-hydroxy corresponding base
  modified_base (4)..(4): 2'-hydroxy corresponding base
  modified_base (5)..(5): 2'-hydroxy corresponding base
  modified_base (6)..(6): 2'-hydroxy corresponding base
  modified_base (7)..(7): 2'-hydroxy corresponding base
  modified_base (8)..(8): 2'-hydroxy corresponding base
  modified_base (9)..(9): 2'-hydroxy corresponding base
  modified_base (10)..(10): 2'-hydroxy corresponding base
  modified_base (11)..(11): 2'-hydroxy corresponding base
  modified_base (12)..(12): 2'-hydroxy corresponding base
  modified_base (13)..(13): 2'-hydroxy corresponding base
  modified_base (14)..(14): 2'-hydroxy corresponding base
  modified_base (15)..(15): 2'-hydroxy corresponding base
  modified_base (16)..(16): 2'-hydroxy corresponding base
  modified_base (17)..(17): 2'-hydroxy corresponding base
  modified_base (18)..(18): 2'-hydroxy corresponding base
  modified_base (19)..(19): 2'-hydroxy corresponding base
  modified_base (20)..(20): deoxythymidine
  modified_base (21)..(21): 5'-thio thymidine
agucggugaccaugacccutt

SEQ ID NO: 393 - DNA, 21 bp, Artificial Sequence
  Description of Artificial Sequence: Synthetic oligonucleotide
  Description of Combined DNA/RNA Molecule: Synthetic oligonucleotide
  siRNAs to PCSK9
  modified_base (1)..(1): 2'-hydroxy corresponding base
  modified_base (2)..(2): 2'-hydroxy corresponding base
  modified_base (3)..(3): 2'-hydroxy corresponding base
  modified_base (4)..(4): 2'-hydroxy corresponding base
  modified_base (5)..(5): 2'-O-methyl corresponding base
  modified_base (6)..(6): 2'-O-methyl corresponding base
  modified_base (7)..(7): 2'-hydroxy corresponding base
  modified_base (8)..(8): 2'-O-methyl corresponding base
  modified_base (9)..(9): 2'-hydroxy corresponding base
  modified_base (10)..(10): 2'-hydroxy corresponding base
  modified_base (11)..(11): 2'-O-methyl corresponding base
  modified_base (12)..(12): 2'-O-methyl corresponding base
  modified_base (13)..(13): 2'-hydroxy corresponding base
  modified_base (14)..(14): 2'-O-methyl corresponding base
  modified_base (15)..(15): 2'-O-methyl corresponding base
  modified_base (16)..(16): 2'-hydroxy corresponding base
  modified_base (17)..(17): 2'-hydroxy corresponding base
  modified_base (18)..(18): 2'-O-methyl corresponding base
  modified_base (19)..(19): 2'-O-methyl corresponding base
  modified_base (20)..(20): deoxythymidine
  modified_base (21)..(21): 5'-thio thymidine
agggucauggucaccgacutt

SEQ ID NO: 394 - DNA, 21 bp, Artificial Sequence
  Description of Artificial Sequence: Synthetic oligonucleotide
  Description of Combined DNA/RNA Molecule: Synthetic oligonucleotide
  siRNAs to PCSK9
  modified_base (1)..(1): 2'-hydroxy corresponding base
  modified_base (2)..(2): 2'-hydroxy corresponding base
  modified_base (3)..(3): 2'-hydroxy corresponding base
  modified_base (4)..(4): 2'-hydroxy corresponding base
  modified_base (5)..(5): 2'-hydroxy corresponding base
  modified_base (6)..(6): 2'-hydroxy corresponding base
  modified_base (7)..(7): 2'-hydroxy corresponding base
  modified_base (8)..(8): 2'-hydroxy corresponding base
  modified_base (9)..(9): 2'-hydroxy corresponding base
  modified_base (10)..(10): 2'-hydroxy corresponding base
  modified_base (11)..(11): 2'-O-methyl corresponding base
  modified_base (12)..(12): 2'-hydroxy corresponding base
  modified_base (13)..(13): 2'-hydroxy corresponding base
  modified_base (14)..(14): 2'-hydroxy corresponding base
  modified_base (15)..(15): 2'-hydroxy corresponding base
  modified_base (16)..(16): 2'-hydroxy corresponding base
  modified_base (17)..(17): 2'-hydroxy corresponding base
  modified_base (18)..(18): 2'-hydroxy corresponding base
  modified_base (19)..(19): 2'-hydroxy corresponding base
  modified_base (20)..(20): deoxythymidine
  modified_base (21)..(21): 5'-thio thymidine
agucggugaccaugacccutt

SEQ ID NO: 395 - DNA, 21 bp, Artificial Sequence
  Description of Artificial Sequence: Synthetic oligonucleotide
  Description of Combined DNA/RNA Molecule: Synthetic oligonucleotide
  siRNAs to PCSK9
  modified_base (1)..(1): 2'-hydroxy corresponding base
  modified_base (2)..(2): 2'-hydroxy corresponding base
  modified_base (3)..(3): 2'-hydroxy corresponding base
  modified_base (4)..(4): 2'-hydroxy corresponding base
  modified_base (5)..(5): 2'-hydroxy corresponding base
  modified_base (6)..(6): 2'-hydroxy corresponding base
  modified_base (7)..(7): 2'-hydroxy corresponding base
  modified_base (8)..(8): 2'-hydroxy corresponding base
  modified_base (9)..(9): 2'-hydroxy corresponding base
  modified_base (10)..(10): 2'-hydroxy corresponding base
  modified_base (11)..(11): 2'-hydroxy corresponding base
  modified_base (12)..(12): 2'-hydroxy corresponding base
  modified_base (13)..(13): 2'-hydroxy corresponding base
  modified_base (14)..(14): 2'-hydroxy corresponding base
  modified_base (15)..(15): 2'-hydroxy corresponding base
  modified_base (16)..(16): 2'-hydroxy corresponding base
  modified_base (17)..(17): 2'-hydroxy corresponding base
  modified_base (18)..(18): 2'-hydroxy corresponding base
  modified_base (19)..(19): 2'-hydroxy corresponding base
  modified_base (20)..(20): deoxythymidine
  modified_base (21)..(21): 5'-thio thymidine
auggucaccgacuucgagatt

SEQ ID NO: 396 - DNA, 21 bp, Artificial Sequence
  Description of Artificial Sequence: Synthetic oligonucleotide
  Description of Combined DNA/RNA Molecule: Synthetic oligonucleotide
  siRNAs to PCSK9
  modified_base (1)..(1): 2'-hydroxy corresponding base
  modified_base (2)..(2): 2'-hydroxy corresponding base
  modified_base (3)..(3): 2'-hydroxy corresponding base
  modified_base (4)..(4): 2'-hydroxy corresponding base
  modified_base (5)..(5): 2'-hydroxy corresponding base
  modified_base (6)..(6): 2'-hydroxy corresponding base
  modified_base (7)..(7): 2'-hydroxy corresponding base
  modified_base (8)..(8): 2'-hydroxy corresponding base
  modified_base (9)..(9): 2'-hydroxy corresponding base
  modified_base (10)..(10): 2'-hydroxy corresponding base
  modified_base (11)..(11): 2'-hydroxy corresponding base
  modified_base (12)..(12): 2'-hydroxy corresponding base
  modified_base (13)..(13): 2'-hydroxy corresponding base
  modified_base (14)..(14): 2'-hydroxy corresponding base
  modified_base (15)..(15): 2'-hydroxy corresponding base
  modified_base (16)..(16): 2'-hydroxy corresponding base
  modified_base (17)..(17): 2'-hydroxy corresponding base
  modified_base (18)..(18): 2'-hydroxy corresponding base
  modified_base (19)..(19): 2'-hydroxy corresponding base
  modified_base (20)..(20): deoxythymidine
  modified_base (21)..(21): 5'-thio thymidine
ucucgaagucggugaccautt

SEQ ID NO: 397 - DNA, 21 bp, Artificial Sequence
  Description of Artificial Sequence: Synthetic oligonucleotide
  Description of Combined DNA/RNA Molecule: Synthetic oligonucleotide
  siRNAs to PCSK9
  modified_base (1)..(1): 2'-hydroxy corresponding base
  modified_base (2)..(2): 2'-O-methyl corresponding base
  modified_base (3)..(3): 2'-hydroxy corresponding base
  modified_base (4)..(4): 2'-hydroxy corresponding base
  modified_base (5)..(5): 2'-O-methyl corresponding base
  modified_base (6)..(6): 2'-O-methyl corresponding base
  modified_base (7)..(7): 2'-hydroxy corresponding base
  modified_base (8)..(8): 2'-O-methyl corresponding base
  modified_base (9)..(9): 2'-O-methyl corresponding base
  modified_base (10)..(10): 2'-hydroxy corresponding base
  modified_base (11)..(11): 2'-hydroxy corresponding base
  modified_base (12)..(12): 2'-O-methyl corresponding base
  modified_base (13)..(13): 2'-O-methyl corresponding base
  modified_base (14)..(14): 2'-O-methyl corresponding base
  modified_base (15)..(15): 2'-O-methyl corresponding base
  modified_base (16)..(16): 2'-hydroxy corresponding base
  modified_base (17)..(17): 2'-hydroxy corresponding base
  modified_base (18)..(18): 2'-hydroxy corresponding base
  modified_base (19)..(19): 2'-hydroxy corresponding base
  modified_base (20)..(20): deoxythymidine
  modified_base (21)..(21): 5'-thio thymidine
auggucaccgacuucgagatt

SEQ ID NO: 398 - DNA, 21 bp, Artificial Sequence
  Description of Artificial Sequence: Synthetic oligonucleotide
  Description of Combined DNA/RNA Molecule: Synthetic oligonucleotide
  siRNAs to PCSK9
  modified_base (1)..(1): 2'-hydroxy corresponding base
  modified_base (2)..(2): 2'-hydroxy corresponding base
  modified_base (3)..(3): 2'-hydroxy corresponding base
  modified_base (4)..(4): 2'-hydroxy corresponding base
  modified_base (5)..(5): 2'-hydroxy corresponding base
  modified_base (6)..(6): 2'-hydroxy corresponding base
  modified_base (7)..(7): 2'-hydroxy corresponding base
  modified_base (8)..(8): 2'-hydroxy corresponding base
  modified_base (9)..(9): 2'-hydroxy corresponding base
  modified_base (10)..(10): 2'-hydroxy corresponding base
  modified_base (11)..(11): 2'-hydroxy corresponding base
  modified_base (12)..(12): 2'-hydroxy corresponding base
  modified_base (13)..(13): 2'-hydroxy corresponding base
  modified_base (14)..(14): 2'-hydroxy corresponding base
  modified_base (15)..(15): 2'-hydroxy corresponding base
  modified_base (16)..(16): 2'-hydroxy corresponding base
  modified_base (17)..(17): 2'-O-methyl corresponding base
  modified_base (18)..(18): 2'-hydroxy corresponding base
  modified_base (19)..(19): 2'-hydroxy corresponding base
  modified_base (20)..(20): deoxythymidine
  modified_base (21)..(21): 5'-thio thymidine
ucucgaagucggugaccautt

SEQ ID NO: 399 - DNA, 21 bp, Artificial Sequence
  Description of Artificial Sequence: Synthetic oligonucleotide
  Description of Combined DNA/RNA Molecule: Synthetic oligonucleotide
  siRNAs to PCSK9
  modified_base (1)..(1): 2'-hydroxy corresponding base
  modified_base (2)..(2): 2'-hydroxy corresponding base
  modified_base (3)..(3): 2'-hydroxy corresponding base
  modified_base (4)..(4): 2'-hydroxy corresponding base
  modified_base (5)..(5): 2'-hydroxy corresponding base
  modified_base (6)..(6): 2'-hydroxy corresponding base
  modified_base (7)..(7): 2'-hydroxy corresponding base
  modified_base (8)..(8): 2'-hydroxy corresponding base
  modified_base (9)..(9): 2'-hydroxy corresponding base
  modified_base (10)..(10): 2'-hydroxy corresponding base
  modified_base (11)..(11): 2'-hydroxy corresponding base
  modified_base (12)..(12): 2'-hydroxy corresponding base
  modified_base (13)..(13): 2'-hydroxy corresponding base
  modified_base (14)..(14): 2'-hydroxy corresponding base
  modified_base (15)..(15): 2'-hydroxy corresponding base
  modified_base (16)..(16): 2'-hydroxy corresponding base
  modified_base (17)..(17): 2'-hydroxy corresponding base
  modified_base (18)..(18): 2'-hydroxy corresponding base
  modified_base (19)..(19): 2'-hydroxy corresponding base
  modified_base (20)..(20): deoxythymidine
  modified_base (21)..(21): deoxythymidine
ccgacuucgagaaugugcctt

SEQ ID NO: 400 - DNA, 21 bp, Artificial Sequence
  Description of Artificial Sequence: Synthetic oligonucleotide
  Description of Combined DNA/RNA Molecule: Synthetic oligonucleotide
  siRNAs to PCSK9
  modified_base (1)..(1): 2'-hydroxy corresponding base
  modified_base (2)..(2): 2'-hydroxy corresponding base
  modified_base (3)..(3): 2'-hydroxy corresponding base
  modified_base (4)..(4): 2'-hydroxy corresponding base
  modified_base (5)..(5): 2'-hydroxy corresponding base
  modified_base (6)..(6): 2'-hydroxy corresponding base
  modified_base (7)..(7): 2'-hydroxy corresponding base
  modified_base (8)..(8): 2'-hydroxy corresponding base
  modified_base (9)..(9): 2'-hydroxy corresponding base
  modified_base (10)..(10): 2'-hydroxy corresponding base
  modified_base (11)..(11): 2'-hydroxy corresponding base
  modified_base (12)..(12): 2'-hydroxy corresponding base
  modified_base (13)..(13): 2'-hydroxy corresponding base
  modified_base (14)..(14): 2'-hydroxy corresponding base
  modified_base (15)..(15): 2'-hydroxy corresponding base
  modified_base (16)..(16): 2'-hydroxy corresponding base
  modified_base (17)..(17): 2'-hydroxy corresponding base
  modified_base (18)..(18): 2'-hydroxy corresponding base
  modified_base (19)..(19): 2'-hydroxy corresponding base
  modified_base (20)..(20): deoxythymidine
  modified_base (21)..(21): deoxythymidine
ggcacauucucgaagucggtt

SEQ ID NO: 401 - DNA, 21 bp, Artificial Sequence
  Description of Artificial Sequence: Synthetic oligonucleotide
  Description of Combined DNA/RNA Molecule: Synthetic oligonucleotide
  siRNAs to PCSK9
  modified_base (1)..(1): 2'-hydroxy corresponding base
  modified_base (2)..(2): 2'-hydroxy corresponding base
  modified_base (3)..(3): 2'-hydroxy corresponding base
  modified_base (4)..(4): 2'-hydroxy corresponding base
  modified_base (5)..(5): 2'-hydroxy corresponding base
  modified_base (6)..(6): 2'-hydroxy corresponding base
  modified_base (7)..(7): 2'-hydroxy corresponding base
  modified_base (8)..(8): 2'-hydroxy corresponding base
  modified_base (9)..(9): 2'-hydroxy corresponding base
  modified_base (10)..(10): 2'-hydroxy corresponding base
  modified_base (11)..(11): 2'-hydroxy corresponding base
  modified_base (12)..(12): 2'-hydroxy corresponding base
  modified_base (13)..(13): 2'-hydroxy corresponding base
  modified_base (14)..(14): 2'-hydroxy corresponding base
  modified_base (15)..(15): 2'-hydroxy corresponding base
  modified_base (16)..(16): 2'-hydroxy corresponding base
  modified_base (17)..(17): 2'-hydroxy corresponding base
  modified_base (18)..(18): 2'-hydroxy corresponding base
  modified_base (19)..(19): 2'-hydroxy corresponding base
  modified_base (20)..(20): deoxythymidine
  modified_base (21)..(21): deoxythymidine
ggaggacgggacccgcuuctt

SEQ ID NO: 402 - DNA, 21 bp, Artificial Sequence
  Description of Artificial Sequence: Synthetic oligonucleotide
  Description of Combined DNA/RNA Molecule: Synthetic oligonucleotide
  siRNAs to PCSK9
  modified_base (1)..(1): 2'-hydroxy corresponding base
  modified_base (2)..(2): 2'-hydroxy corresponding base
  modified_base (3)..(3): 2'-hydroxy corresponding base
  modified_base (4)..(4): 2'-hydroxy corresponding base
  modified_base (5)..(5): 2'-hydroxy corresponding base
  modified_base (6)..(6): 2'-hydroxy corresponding base
  modified_base (7)..(7): 2'-hydroxy corresponding base
  modified_base (8)..(8): 2'-hydroxy corresponding base
  modified_base (9)..(9): 2'-hydroxy corresponding base
  modified_base (10)..(10): 2'-hydroxy corresponding base
  modified_base (11)..(11): 2'-hydroxy corresponding base
  modified_base (12)..(12): 2'-hydroxy corresponding base
  modified_base (13)..(13): 2'-hydroxy corresponding base
  modified_base (14)..(14): 2'-hydroxy corresponding base
  modified_base (15)..(15): 2'-hydroxy corresponding base
  modified_base (16)..(16): 2'-hydroxy corresponding base
  modified_base (17)..(17): 2'-hydroxy corresponding base
  modified_base (18)..(18): 2'-hydroxy corresponding base
  modified_base (19)..(19): 2'-hydroxy corresponding base
  modified_base (20)..(20): deoxythymidine
  modified_base (21)..(21): deoxythymidine
gaagcgggucccguccucctt

SEQ ID NO: 403 - DNA, 21 bp, Artificial Sequence
  Description of Artificial Sequence: Synthetic oligonucleotide
  Description of Combined DNA/RNA Molecule: Synthetic oligonucleotide
  siRNAs to PCSK9
  modified_base (1)..(1): 2'-hydroxy corresponding base
  modified_base (2)..(2): 2'-hydroxy corresponding base
  modified_base (3)..(3): 2'-hydroxy corresponding base
  modified_base (4)..(4): 2'-hydroxy corresponding base
  modified_base (5)..(5): 2'-hydroxy corresponding base
  modified_base (6)..(6): 2'-hydroxy corresponding base
  modified_base (7)..(7): 2'-hydroxy corresponding base
  modified_base (8)..(8): 2'-hydroxy corresponding base
  modified_base (9)..(9): 2'-hydroxy corresponding base
  modified_base (10)..(10): 2'-hydroxy corresponding base
  modified_base (11)..(11): 2'-hydroxy corresponding base
  modified_base (12)..(12): 2'-hydroxy corresponding base
  modified_base (13)..(13): 2'-hydroxy corresponding base
  modified_base (14)..(14): 2'-hydroxy corresponding base
  modified_base (15)..(15): 2'-hydroxy corresponding base
  modified_base (16)..(16): 2'-hydroxy corresponding base
  modified_base (17)..(17): 2'-hydroxy corresponding base
  modified_base (18)..(18): 2'-hydroxy corresponding base
  modified_base (19)..(19): 2'-hydroxy corresponding base
  modified_base (20)..(20): deoxythymidine
  modified_base (21)..(21): 5'-thio thymidine
cagcggccgggaugccggctt

SEQ ID NO: 404 - DNA, 21 bp, Artificial Sequence
  Description of Artificial Sequence: Synthetic oligonucleotide
  Description of Combined DNA/RNA Molecule: Synthetic oligonucleotide
  siRNAs to PCSK9
  modified_base (1)..(1): 2'-hydroxy corresponding base
  modified_base (2)..(2): 2'-hydroxy corresponding base
  modified_base (3)..(3): 2'-hydroxy corresponding base
  modified_base (4)..(4): 2'-hydroxy corresponding base
  modified_base (5)..(5): 2'-hydroxy corresponding base
  modified_base (6)..(6): 2'-hydroxy corresponding base
  modified_base (7)..(7): 2'-hydroxy corresponding base
  modified_base (8)..(8): 2'-hydroxy corresponding base
  modified_base (9)..(9): 2'-hydroxy corresponding base
  modified_base (10)..(10): 2'-hydroxy corresponding base
  modified_base (11)..(11): 2'-hydroxy corresponding base
  modified_base (12)..(12): 2'-hydroxy corresponding base
  modified_base (13)..(13): 2'-hydroxy corresponding base
  modified_base (14)..(14): 2'-hydroxy corresponding base
  modified_base (15)..(15): 2'-hydroxy corresponding base
  modified_base (16)..(16): 2'-hydroxy corresponding base
  modified_base (17)..(17): 2'-hydroxy corresponding base
  modified_base (18)..(18): 2'-hydroxy corresponding base
  modified_base (19)..(19): 2'-hydroxy corresponding base
  modified_base (20)..(20): deoxythymidine
  modified_base (21)..(21): 5'-thio thymidine
gccggcaucccggccgcugtt

SEQ ID NO: 405 - DNA, 21 bp, Artificial Sequence
  Description of Artificial Sequence: Synthetic oligonucleotide
  Description of Combined DNA/RNA Molecule: Synthetic oligonucleotide
  siRNAs to PCSK9
  modified_base (1)..(1): 2'-O-methyl corresponding base
  modified_base (2)..(2): 2'-hydroxy corresponding base
  modified_base (3)..(3): 2'-hydroxy corresponding base
  modified_base (4)..(4): 2'-O-methyl corresponding base
  modified_base (5)..(5): 2'-hydroxy corresponding base
  modified_base (6)..(6): 2'-hydroxy corresponding base
  modified_base (7)..(7): 2'-O-methyl corresponding base
  modified_base (8)..(8): 2'-O-methyl corresponding base
  modified_base (9)..(9): 2'-hydroxy corresponding base
  modified_base (10)..(10): 2'-hydroxy corresponding base
  modified_base (11)..(11): 2'-hydroxy corresponding base
  modified_base (12)..(12): 2'-hydroxy corresponding base
  modified_base (13)..(13): 2'-O-methyl corresponding base
  modified_base (14)..(14): 2'-hydroxy corresponding base
  modified_base (15)..(15): 2'-O-methyl corresponding base
  modified_base (16)..(16): 2'-O-methyl corresponding base
  modified_base (17)..(17): 2'-hydroxy corresponding base
  modified_base (18)..(18): 2'-hydroxy corresponding base
  modified_base (19)..(19): 2'-O-methyl corresponding base
  modified_base (20)..(20): deoxythymidine
  modified_base (21)..(21): 5'-thio thymidine
cagcggccgggaugccggctt

SEQ ID NO: 406 - DNA, 21 bp, Artificial Sequence
  Description of Artificial Sequence: Synthetic oligonucleotide
  Description of Combined DNA/RNA Molecule: Synthetic oligonucleotide
  siRNAs to PCSK9
  modified_base (1)..(1): 2'-hydroxy corresponding base
  modified_base (2)..(2): 2'-hydroxy corresponding base
  modified_base (3)..(3): 2'-hydroxy corresponding base
  modified_base (4)..(4): 2'-hydroxy corresponding base
  modified_base (5)..(5): 2'-hydroxy corresponding base
  modified_base (6)..(6): 2'-O-methyl corresponding base
  modified_base (7)..(7): 2'-hydroxy corresponding base
  modified_base (8)..(8): 2'-hydroxy corresponding base
  modified_base (9)..(9): 2'-hydroxy corresponding base
  modified_base (10)..(10): 2'-hydroxy corresponding base
  modified_base (11)..(11): 2'-hydroxy corresponding base
  modified_base (12)..(12): 2'-hydroxy corresponding base
  modified_base (13)..(13): 2'-hydroxy corresponding base
  modified_base (14)..(14): 2'-hydroxy corresponding base
  modified_base (15)..(15): 2'-hydroxy corresponding base
  modified_base (16)..(16): 2'-hydroxy corresponding base
  modified_base (17)..(17): 2'-hydroxy corresponding base
  modified_base (18)..(18): 2'-hydroxy corresponding base
  modified_base (19)..(19): 2'-hydroxy corresponding base
  modified_base (20)..(20): deoxythymidine
  modified_base (21)..(21): 5'-thio thymidine
gccggcaucccggccgcugtt

SEQ ID NO: 407 - DNA, 21 bp, Artificial Sequence
  Description of Artificial Sequence: Synthetic oligonucleotide
  Description of Combined DNA/RNA Molecule: Synthetic oligonucleotide
  siRNAs to PCSK9
  modified_base (1)..(1): 2'-hydroxy corresponding base
  modified_base (2)..(2): 2'-hydroxy corresponding base
  modified_base (3)..(3): 2'-hydroxy corresponding base
  modified_base (4)..(4): 2'-hydroxy corresponding base
  modified_base (5)..(5): 2'-hydroxy corresponding base
  modified_base (6)..(6): 2'-hydroxy corresponding base
  modified_base (7)..(7): 2'-hydroxy corresponding base
  modified_base (8)..(8): 2'-hydroxy corresponding base
  modified_base (9)..(9): 2'-hydroxy corresponding base
  modified_base (10)..(10): 2'-hydroxy corresponding base
  modified_base (11)..(11): 2'-hydroxy corresponding base
  modified_base (12)..(12): 2'-hydroxy corresponding base
  modified_base (13)..(13): 2'-hydroxy corresponding base
  modified_base (14)..(14): 2'-hydroxy corresponding base
  modified_base (15)..(15): 2'-hydroxy corresponding base
  modified_base (16)..(16): 2'-hydroxy corresponding base
  modified_base (17)..(17): 2'-hydroxy corresponding base
  modified_base (18)..(18): 2'-hydroxy corresponding base
  modified_base (19)..(19): 2'-hydroxy corresponding base
  modified_base (20)..(20): deoxythymidine
  modified_base (21)..(21): deoxythymidine
gggugccagcaugcgcagctt

SEQ ID NO: 408 - DNA, 21 bp, Artificial Sequence
  Description of Artificial Sequence: Synthetic oligonucleotide
  Description of Combined DNA/RNA Molecule: Synthetic oligonucleotide
  siRNAs to PCSK9
  modified_base (1)..(1): 2'-hydroxy corresponding base
  modified_base (2)..(2): 2'-hydroxy corresponding base
  modified_base (3)..(3): 2'-hydroxy corresponding base
  modified_base (4)..(4): 2'-hydroxy corresponding base
  modified_base (5)..(5): 2'-hydroxy corresponding base
  modified_base (6)..(6): 2'-hydroxy corresponding base
  modified_base (7)..(7): 2'-hydroxy corresponding base
  modified_base (8)..(8): 2'-hydroxy corresponding base
  modified_base (9)..(9): 2'-hydroxy corresponding base
  modified_base (10)..(10): 2'-hydroxy corresponding base
  modified_base (11)..(11): 2'-hydroxy corresponding base
  modified_base (12)..(12): 2'-hydroxy corresponding base
  modified_base (13)..(13): 2'-hydroxy corresponding base
  modified_base (14)..(14): 2'-hydroxy corresponding base
  modified_base (15)..(15): 2'-hydroxy corresponding base
  modified_base (16)..(16): 2'-hydroxy corresponding base
  modified_base (17)..(17): 2'-hydroxy corresponding base
  modified_base (18)..(18): 2'-hydroxy corresponding base
  modified_base (19)..(19): 2'-hydroxy corresponding base
  modified_base (20)..(20): deoxythymidine
  modified_base (21)..(21): deoxythymidine
gcugcgcaugcuggcaccctt

SEQ ID NO: 409 - DNA, 21 bp, Artificial Sequence
  Description of Artificial Sequence: Synthetic oligonucleotide
  Description of Combined DNA/RNA Molecule: Synthetic oligonucleotide
  siRNAs to PCSK9
  modified_base (1)..(1): 2'-hydroxy corresponding base
  modified_base (2)..(2): 2'-hydroxy corresponding base
  modified_base (3)..(3): 2'-hydroxy corresponding base
  modified_base (4)..(4): 2'-hydroxy corresponding base
  modified_base (5)..(5): 2'-hydroxy corresponding base
  modified_base (6)..(6): 2'-hydroxy corresponding base
  modified_base (7)..(7): 2'-hydroxy corresponding base
  modified_base (8)..(8): 2'-hydroxy corresponding base
  modified_base (9)..(9): 2'-hydroxy corresponding base
  modified_base (10)..(10): 2'-hydroxy corresponding base
  modified_base (11)..(11): 2'-hydroxy corresponding base
  modified_base (12)..(12): 2'-hydroxy corresponding base
  modified_base (13)..(13): 2'-hydroxy corresponding base
  modified_base (14)..(14): 2'-hydroxy corresponding base
  modified_base (15)..(15): 2'-hydroxy corresponding base
  modified_base (16)..(16): 2'-hydroxy corresponding base
  modified_base (17)..(17): 2'-hydroxy corresponding base
  modified_base (18)..(18): 2'-hydroxy corresponding base
  modified_base (19)..(19): 2'-hydroxy corresponding base
  modified_base (20)..(20): deoxythymidine
  modified_base (21)..(21): 5'-thio thymidine
ccugcgcgugcucaacugctt

SEQ ID NO: 410 - DNA, 21 bp, Artificial Sequence
  Description of Artificial Sequence: Synthetic oligonucleotide
  Description of Combined DNA/RNA Molecule: Synthetic oligonucleotide
  siRNAs to PCSK9
  modified_base (1)..(1): 2'-hydroxy corresponding base
  modified_base (2)..(2): 2'-hydroxy corresponding base
  modified_base (3)..(3): 2'-hydroxy corresponding base
  modified_base (4)..(4): 2'-hydroxy corresponding base
  modified_base (5)..(5): 2'-hydroxy corresponding base
  modified_base (6)..(6): 2'-hydroxy corresponding base
  modified_base (7)..(7): 2'-hydroxy corresponding base
  modified_base (8)..(8): 2'-hydroxy corresponding base
  modified_base (9)..(9): 2'-hydroxy corresponding base
  modified_base (10)..(10): 2'-hydroxy corresponding base
  modified_base (11)..(11): 2'-hydroxy corresponding base
  modified_base (12)..(12): 2'-hydroxy corresponding base
  modified_base (13)..(13): 2'-hydroxy corresponding base
  modified_base (14)..(14): 2'-hydroxy corresponding base
  modified_base (15)..(15): 2'-hydroxy corresponding base
  modified_base (16)..(16): 2'-hydroxy corresponding base
  modified_base (17)..(17): 2'-hydroxy corresponding base
  modified_base (18)..(18): 2'-hydroxy corresponding base
  modified_base (19)..(19): 2'-hydroxy corresponding base
  modified_base (20)..(20): deoxythymidine
  modified_base (21)..(21): 5'-thio thymidine
gcaguugagcacgcgcaggtt

SEQ ID NO: 411 - DNA, 21 bp, Artificial Sequence
  Description of Artificial Sequence: Synthetic oligonucleotide
  Description of Combined DNA/RNA Molecule: Synthetic oligonucleotide
  siRNAs to PCSK9
  modified_base (1)..(1): 2'-O-methyl corresponding base
  modified_base (2)..(2): 2'-O-methyl corresponding base
  modified_base (3)..(3): 2'-O-methyl corresponding base
  modified_base (4)..(4): 2'-hydroxy corresponding base
  modified_base (5)..(5): 2'-O-methyl corresponding base
  modified_base (6)..(6): 2'-hydroxy corresponding base
  modified_base (7)..(7): 2'-O-methyl corresponding base
  modified_base (8)..(8): 2'-hydroxy corresponding base
  modified_base (9)..(9): 2'-O-methyl corresponding base
  modified_base (10)..(10): 2'-hydroxy corresponding base
  modified_base (11)..(11): 2'-O-methyl corresponding base
  modified_base (12)..(12): 2'-O-methyl corresponding base
  modified_base (13)..(13): 2'-O-methyl corresponding base
  modified_base (14)..(14): 2'-hydroxy corresponding base
  modified_base (15)..(15): 2'-hydroxy corresponding base
  modified_base (16)..(16): 2'-O-methyl corresponding base
  modified_base (17)..(17): 2'-O-methyl corresponding base
  modified_base (18)..(18): 2'-hydroxy corresponding base
  modified_base (19)..(19): 2'-O-methyl corresponding base
  modified_base (20)..(20): deoxythymidine
  modified_base (21)..(21): 5'-thio thymidine
ccugcgcgugcucaacugctt

SEQ ID NO: 412 - DNA, 21 bp, Artificial Sequence
  Description of Artificial Sequence: Synthetic oligonucleotide
  Description of Combined DNA/RNA Molecule: Synthetic oligonucleotide
  siRNAs to PCSK9
  modified_base (1)..(1): 2'-hydroxy corresponding base
  modified_base (2)..(2): 2'-O-methyl corresponding base
  modified_base (3)..(3): 2'-hydroxy corresponding base
  modified_base (4)..(4): 2'-hydroxy corresponding base
  modified_base (5)..(5): 2'-hydroxy corresponding base
  modified_base (6)..(6): 2'-hydroxy corresponding base
  modified_base (7)..(7): 2'-hydroxy corresponding base
  modified_base (8)..(8): 2'-hydroxy corresponding base
  modified_base (9)..(9): 2'-hydroxy corresponding base
  modified_base (10)..(10): 2'-O-methyl corresponding base
  modified_base (11)..(11): 2'-hydroxy corresponding base
  modified_base (12)..(12): 2'-hydroxy corresponding base
  modified_base (13)..(13): 2'-hydroxy corresponding base
  modified_base (14)..(14): 2'-hydroxy corresponding base
  modified_base (15)..(15): 2'-hydroxy corresponding base
  modified_base (16)..(16): 2'-O-methyl corresponding base
  modified_base (17)..(17): 2'-hydroxy corresponding base
  modified_base (18)..(18): 2'-hydroxy corresponding base
  modified_base (19)..(19): 2'-hydroxy corresponding base
  modified_base (20)..(20): deoxythymidine
  modified_base (21)..(21): 5'-thio thymidine
gcaguugagcacgcgcaggtt

SEQ ID NO: 413 - DNA, 21 bp, Artificial Sequence
  Description of Artificial Sequence: Synthetic oligonucleotide
  Description of Combined DNA/RNA Molecule: Synthetic oligonucleotide
  siRNAs to PCSK9
  modified_base (1)..(1): 2'-hydroxy corresponding base
  modified_base (2)..(2): 2'-hydroxy corresponding base
  modified_base (3)..(3): 2'-hydroxy corresponding base
  modified_base (4)..(4): 2'-hydroxy corresponding base
  modified_base (5)..(5): 2'-hydroxy corresponding base
  modified_base (6)..(6): 2'-hydroxy corresponding base
  modified_base (7)..(7): 2'-hydroxy corresponding base
  modified_base (8)..(8): 2'-hydroxy corresponding base
  modified_base (9)..(9): 2'-hydroxy corresponding base
  modified_base (10)..(10): 2'-hydroxy corresponding base
  modified_base (11)..(11): 2'-hydroxy corresponding base
  modified_base (12)..(12): 2'-hydroxy corresponding base
  modified_base (13)..(13): 2'-hydroxy corresponding base
  modified_base (14)..(14): 2'-hydroxy corresponding base
  modified_base (15)..(15): 2'-hydroxy corresponding base
  modified_base (16)..(16): 2'-hydroxy corresponding base
  modified_base (17)..(17): 2'-hydroxy corresponding base
  modified_base (18)..(18): 2'-hydroxy corresponding base
  modified_base (19)..(19): 2'-hydroxy corresponding base
  modified_base (20)..(20): deoxythymidine
  modified_base (21)..(21): 5'-thio thymidine
ugcgcgugcucaacugccatt

SEQ ID NO: 414 - DNA, 21 bp, Artificial Sequence
  Description of Artificial Sequence: Synthetic oligonucleotide
  Description of Combined DNA/RNA Molecule: Synthetic oligonucleotide
  siRNAs to PCSK9
  modified_base (1)..(1): 2'-hydroxy corresponding base
  modified_base (2)..(2): 2'-hydroxy corresponding base
  modified_base (3)..(3): 2'-hydroxy corresponding base
  modified_base (4)..(4): 2'-hydroxy corresponding base
  modified_base (5)..(5): 2'-hydroxy corresponding base
  modified_base (6)..(6): 2'-hydroxy corresponding base
  modified_base (7)..(7): 2'-hydroxy corresponding base
  modified_base (8)..(8): 2'-hydroxy corresponding base
  modified_base (9)..(9): 2'-hydroxy corresponding base
  modified_base (10)..(10): 2'-hydroxy corresponding base
  modified_base (11)..(11): 2'-hydroxy corresponding base
  modified_base (12)..(12): 2'-hydroxy corresponding base
  modified_base (13)..(13): 2'-hydroxy corresponding base
  modified_base (14)..(14): 2'-hydroxy corresponding base
  modified_base (15)..(15): 2'-hydroxy corresponding base
  modified_base (16)..(16): 2'-hydroxy corresponding base
  modified_base (17)..(17): 2'-hydroxy corresponding base
  modified_base (18)..(18): 2'-hydroxy corresponding base
  modified_base (19)..(19): 2'-hydroxy corresponding base
  modified_base (20)..(20): deoxythymidine
  modified_base (21)..(21): 5'-thio thymidine
uggcaguugagcacgcgcatt

SEQ ID NO: 415 - DNA, 21 bp, Artificial Sequence
  Description of Artificial Sequence: Synthetic oligonucleotide
  Description of Combined DNA/RNA Molecule: Synthetic oligonucleotide
  siRNAs to PCSK9
  modified_base (1)..(1): 2'-O-methyl corresponding base
  modified_base (2)..(2): 2'-hydroxy corresponding base
  modified_base (3)..(3): 2'-O-methyl corresponding base
  modified_base (4)..(4): 2'-hydroxy corresponding base
  modified_base (5)..(5): 2'-O-methyl corresponding base
  modified_base (6)..(6): 2'-hydroxy corresponding base
  modified_base (7)..(7): 2'-O-methyl corresponding base
  modified_base (8)..(8): 2'-hydroxy corresponding base
  modified_base (9)..(9): 2'-O-methyl corresponding base
  modified_base (10)..(10): 2'-O-methyl corresponding base
  modified_base (11)..(11): 2'-O-methyl corresponding base
  modified_base (12)..(12): 2'-hydroxy corresponding base
  modified_base (13)..(13): 2'-hydroxy corresponding base
  modified_base (14)..(14): 2'-O-methyl corresponding base
  modified_base (15)..(15): 2'-O-methyl corresponding base
  modified_base (16)..(16): 2'-hydroxy corresponding base
  modified_base (17)..(17): 2'-O-methyl corresponding base
  modified_base (18)..(18): 2'-O-methyl corresponding base
  modified_base (19)..(19): 2'-hydroxy corresponding base
  modified_base (20)..(20): deoxythymidine
  modified_base (21)..(21): 5'-thio thymidine
ugcgcgugcucaacugccatt

SEQ ID NO: 416 - DNA, 21 bp, Artificial Sequence
  Description of Artificial Sequence: Synthetic oligonucleotide
  Description of Combined DNA/RNA Molecule: Synthetic oligonucleotide
  siRNAs to PCSK9
  modified_base (1)..(1): 2'-hydroxy corresponding base
  modified_base (2)..(2): 2'-hydroxy corresponding base
  modified_base (3)..(3): 2'-hydroxy corresponding base
  modified_base (4)..(4): 2'-O-methyl corresponding base
  modified_base (5)..(5): 2'-hydroxy corresponding base
  modified_base (6)..(6): 2'-hydroxy corresponding base
  modified_base (7)..(7): 2'-hydroxy corresponding base
  modified_base (8)..(8): 2'-hydroxy corresponding base
  modified_base (9)..(9): 2'-hydroxy corresponding base
  modified_base (10)..(10): 2'-hydroxy corresponding base
  modified_base (11)..(11): 2'-hydroxy corresponding base
  modified_base (12)..(12): 2'-O-methyl corresponding base
  modified_base (13)..(13): 2'-hydroxy corresponding base
  modified_base (14)..(14): 2'-hydroxy corresponding base
  modified_base (15)..(15): 2'-hydroxy corresponding base
  modified_base (16)..(16): 2'-hydroxy corresponding base
  modified_base (17)..(17): 2'-hydroxy corresponding base
  modified_base (18)..(18): 2'-O-methyl corresponding base
  modified_base (19)..(19): 2'-hydroxy corresponding base
  modified_base (20)..(20): deoxythymidine
  modified_base (21)..(21): 5'-thio thymidine
uggcaguugagcacgcgcatt

SEQ ID NO: 417 - DNA, 21 bp, Artificial Sequence
  Description of Artificial Sequence: Synthetic oligonucleotide
  Description of Combined DNA/RNA Molecule: Synthetic oligonucleotide
  siRNAs to PCSK9
  modified_base (1)..(1): 2'-hydroxy corresponding base
  modified_base (2)..(2): 2'-hydroxy corresponding base
  modified_base (3)..(3): 2'-hydroxy corresponding base
  modified_base (4)..(4): 2'-hydroxy corresponding base
  modified_base (5)..(5): 2'-hydroxy corresponding base
  modified_base (6)..(6): 2'-hydroxy corresponding base
  modified_base (7)..(7): 2'-hydroxy corresponding base
  modified_base (8)..(8): 2'-hydroxy corresponding base
  modified_base (9)..(9): 2'-hydroxy corresponding base
  modified_base (10)..(10): 2'-hydroxy corresponding base
  modified_base (11)..(11): 2'-hydroxy corresponding base
  modified_base (12)..(12): 2'-hydroxy corresponding base
  modified_base (13)..(13): 2'-hydroxy corresponding base
  modified_base (14)..(14): 2'-hydroxy corresponding base
  modified_base (15)..(15): 2'-hydroxy corresponding base
  modified_base (16)..(16): 2'-hydroxy corresponding base
  modified_base (17)..(17): 2'-hydroxy corresponding base
  modified_base (18)..(18): 2'-hydroxy corresponding base
  modified_base (19)..(19): 2'-hydroxy corresponding base
  modified_base (20)..(20): deoxythymidine
  modified_base (21)..(21): 5'-thio thymidine
cgcgugcucaacugccaagtt

SEQ ID NO: 418 - DNA, 21 bp, Artificial Sequence
  Description of Artificial Sequence: Synthetic oligonucleotide
  Description of Combined DNA/RNA Molecule: Synthetic oligonucleotide
  siRNAs to PCSK9
  modified_base (1)..(1): 2'-hydroxy corresponding base
  modified_base (2)..(2): 2'-hydroxy corresponding base
  modified_base (3)..(3): 2'-hydroxy corresponding base
  modified_base (4)..(4): 2'-hydroxy corresponding base
  modified_base (5)..(5): 2'-hydroxy corresponding base
  modified_base (6)..(6): 2'-hydroxy corresponding base
  modified_base (7)..(7): 2'-hydroxy corresponding base
  modified_base (8)..(8): 2'-hydroxy corresponding base
  modified_base (9)..(9): 2'-hydroxy corresponding base
  modified_base (10)..(10): 2'-hydroxy corresponding base
  modified_base (11)..(11): 2'-hydroxy corresponding base
  modified_base (12)..(12): 2'-hydroxy corresponding base
  modified_base (13)..(13): 2'-hydroxy corresponding base
  modified_base (14)..(14): 2'-hydroxy corresponding base
  modified_base (15)..(15): 2'-hydroxy corresponding base
  modified_base (16)..(16): 2'-hydroxy corresponding base
  modified_base (17)..(17): 2'-hydroxy corresponding base
  modified_base (18)..(18): 2'-hydroxy corresponding base
  modified_base (19)..(19): 2'-hydroxy corresponding base
  modified_base (20)..(20): deoxythymidine
  modified_base (21)..(21): 5'-thio thymidine
cuuggcaguugagcacgcgtt

SEQ ID NO: 419 - DNA, 21 bp, Artificial Sequence
  Description of Artificial Sequence: Synthetic oligonucleotide
  Description of Combined DNA/RNA Molecule: Synthetic oligonucleotide
  siRNAs to PCSK9
  modified_base (1)..(1): 2'-O-methyl corresponding base
  modified_base (2)..(2): 2'-hydroxy corresponding base
  modified_base (3)..(3): 2'-O-methyl corresponding base
  modified_base (4)..(4): 2'-hydroxy corresponding base
  modified_base (5)..(5): 2'-O-methyl corresponding base
  modified_base (6)..(6): 2'-hydroxy corresponding base
  modified_base (7)..(7): 2'-O-methyl corresponding base
  modified_base (8)..(8): 2'-O-methyl corresponding base
  modified_base (9)..(9): 2'-O-methyl corresponding base
  modified_base (10)..(10): 2'-hydroxy corresponding base
  modified_base (11)..(11): 2'-hydroxy corresponding base
  modified_base (12)..(12): 2'-O-methyl corresponding base
  modified_base (13)..(13): 2'-O-methyl corresponding base
  modified_base (14)..(14): 2'-hydroxy corresponding base
  modified_base (15)..(15): 2'-O-methyl corresponding base
  modified_base (16)..(16): 2'-O-methyl corresponding base
  modified_base (17)..(17): 2'-hydroxy corresponding base
  modified_base (18)..(18): 2'-hydroxy corresponding base
  modified_base (19)..(19): 2'-hydroxy corresponding base
  modified_base (20)..(20): deoxythymidine
  modified_base (21)..(21): 5'-thio thymidine
cgcgugcucaacugccaagtt

SEQ ID NO: 420 - DNA, 21 bp, Artificial Sequence
  Description of Artificial Sequence: Synthetic oligonucleotide
  Description of Combined DNA/RNA Molecule: Synthetic oligonucleotide
  siRNAs to PCSK9
  modified_base (1)..(1): 2'-hydroxy corresponding base
  modified_base (2)..(2): 2'-hydroxy corresponding base
  modified_base (3)..(3): 2'-hydroxy corresponding base
  modified_base (4)..(4): 2'-hydroxy corresponding base
  modified_base (5)..(5): 2'-hydroxy corresponding base
  modified_base (6)..(6): 2'-O-methyl corresponding base
  modified_base (7)..(7): 2'-hydroxy corresponding base
  modified_base (8)..(8): 2'-hydroxy corresponding base
  modified_base (9)..(9): 2'-hydroxy corresponding base
  modified_base (10)..(10): 2'-hydroxy corresponding base
  modified_base (11)..(11): 2'-hydroxy corresponding base
  modified_base (12)..(12): 2'-hydroxy corresponding base
  modified_base (13)..(13): 2'-hydroxy corresponding base
  modified_base (14)..(14): 2'-O-methyl corresponding base
  modified_base (15)..(15): 2'-hydroxy corresponding base
  modified_base (16)..(16): 2'-hydroxy corresponding base
  modified_base (17)..(17): 2'-hydroxy corresponding base
  modified_base (18)..(18): 2'-hydroxy corresponding base
  modified_base (19)..(19): 2'-hydroxy corresponding base
  modified_base (20)..(20): deoxythymidine
  modified_base (21)..(21): 5'-thio thymidine
cuuggcaguugagcacgcgtt

SEQ ID NO: 421 - DNA, 21 bp, Artificial Sequence
  Description of Artificial Sequence: Synthetic oligonucleotide
  Description of Combined DNA/RNA Molecule: Synthetic oligonucleotide
  siRNAs to PCSK9
  modified_base (1)..(1): 2'-hydroxy corresponding base
  modified_base (2)..(2): 2'-hydroxy corresponding base
  modified_base (3)..(3): 2'-hydroxy corresponding base
  modified_base (4)..(4): 2'-hydroxy corresponding base
  modified_base (5)..(5): 2'-hydroxy corresponding base
  modified_base (6)..(6): 2'-hydroxy corresponding base
  modified_base (7)..(7): 2'-hydroxy corresponding base
  modified_base (8)..(8): 2'-hydroxy corresponding base
  modified_base (9)..(9): 2'-hydroxy corresponding base
  modified_base (10)..(10): 2'-hydroxy corresponding base
  modified_base (11)..(11): 2'-hydroxy corresponding base
  modified_base (12)..(12): 2'-hydroxy corresponding base
  modified_base (13)..(13): 2'-hydroxy corresponding base
  modified_base (14)..(14): 2'-hydroxy corresponding base
  modified_base (15)..(15): 2'-hydroxy corresponding base
  modified_base (16)..(16): 2'-hydroxy corresponding base
  modified_base (17)..(17): 2'-hydroxy corresponding base
  modified_base (18)..(18): 2'-hydroxy corresponding base
  modified_base (19)..(19): 2'-hydroxy corresponding base
  modified_base (20)..(20): deoxythymidine
  modified_base (21)..(21): 5'-thio thymidine
cugccaagggaagggcacgtt

SEQ ID NO: 422 - DNA, 21 bp, Artificial Sequence
  Description of Artificial Sequence: Synthetic oligonucleotide
  Description of Combined DNA/RNA Molecule: Synthetic oligonucleotide
  siRNAs to PCSK9
  modified_base (1)..(1): 2'-hydroxy corresponding base
  modified_base (2)..(2): 2'-hydroxy corresponding base
  modified_base (3)..(3): 2'-hydroxy corresponding base
  modified_base (4)..(4): 2'-hydroxy corresponding base
  modified_base (5)..(5): 2'-hydroxy corresponding base
  modified_base (6)..(6): 2'-hydroxy corresponding base
  modified_base (7)..(7): 2'-hydroxy corresponding base
  modified_base (8)..(8): 2'-hydroxy corresponding base
  modified_base (9)..(9): 2'-hydroxy corresponding base
  modified_base (10)..(10): 2'-hydroxy corresponding base
  modified_base (11)..(11): 2'-hydroxy corresponding base
  modified_base (12)..(12): 2'-hydroxy corresponding base
  modified_base (13)..(13): 2'-hydroxy corresponding base
  modified_base (14)..(14): 2'-hydroxy corresponding base
  modified_base (15)..(15): 2'-hydroxy corresponding base
  modified_base (16)..(16): 2'-hydroxy corresponding base
  modified_base (17)..(17): 2'-hydroxy corresponding base
  modified_base (18)..(18): 2'-hydroxy corresponding base
  modified_base (19)..(19): 2'-hydroxy corresponding base
  modified_base (20)..(20): deoxythymidine
  modified_base (21)..(21): 5'-thio thymidine
cgugcccuucccuuggcagtt

SEQ ID NO: 423 - DNA, 21 bp, Artificial Sequence
  Description of Artificial Sequence: Synthetic oligonucleotide
  Description of Combined DNA/RNA Molecule: Synthetic oligonucleotide
  siRNAs to PCSK9
  modified_base (1)..(1): 2'-O-methyl corresponding base
  modified_base (2)..(2): 2'-O-methyl corresponding base
  modified_base (3)..(3): 2'-hydroxy corresponding base
  modified_base (4)..(4): 2'-O-methyl corresponding base
  modified_base (5)..(5): 2'-O-methyl corresponding base
  modified_base (6)..(6): 2'-hydroxy corresponding base
  modified_base (7)..(7): 2'-hydroxy corresponding base
  modified_base (8)..(8): 2'-hydroxy corresponding base
  modified_base (9)..(9): 2'-hydroxy corresponding base
  modified_base (10)..(10): 2'-hydroxy corresponding base
  modified_base (11)..(11): 2'-hydroxy corresponding base
  modified_base (12)..(12): 2'-hydroxy corresponding base
  modified_base (13)..(13): 2'-hydroxy corresponding base
  modified_base (14)..(14): 2'-hydroxy corresponding base
  modified_base (15)..(15): 2'-hydroxy corresponding base
  modified_base (16)..(16): 2'-O-methyl corresponding base
  modified_base (17)..(17): 2'-hydroxy corresponding base
  modified_base (18)..(18): 2'-O-methyl corresponding base
  modified_base (19)..(19): 2'-hydroxy corresponding base
  modified_base (20)..(20): deoxythymidine
  modified_base (21)..(21): 5'-thio thymidine
cugccaagggaagggcacgtt

SEQ ID NO: 424 - DNA, 21 bp, Artificial Sequence
  Description of Artificial Sequence: Synthetic oligonucleotide
  Description of Combined DNA/RNA Molecule: Synthetic oligonucleotide
  siRNAs to PCSK9
  modified_base (1)..(1): 2'-hydroxy corresponding base
  modified_base (2)..(2): 2'-hydroxy corresponding base
  modified_base (3)..(3): 2'-hydroxy corresponding base
  modified_base (4)..(4): 2'-hydroxy corresponding base
  modified_base (5)..(5): 2'-hydroxy corresponding base
  modified_base (6)..(6): 2'-hydroxy corresponding base
  modified_base (7)..(7): 2'-hydroxy corresponding base
  modified_base (8)..(8): 2'-hydroxy corresponding base
  modified_base (9)..(9): 2'-hydroxy corresponding base
  modified_base (10)..(10): 2'-hydroxy corresponding base
  modified_base (11)..(11): 2'-hydroxy corresponding base
  modified_base (12)..(12): 2'-hydroxy corresponding base
  modified_base (13)..(13): 2'-hydroxy corresponding base
  modified_base (14)..(14): 2'-hydroxy corresponding base
  modified_base (15)..(15): 2'-hydroxy corresponding base
  modified_base (16)..(16): 2'-hydroxy corresponding base
  modified_base (17)..(17): 2'-O-methyl corresponding base
  modified_base (18)..(18): 2'-hydroxy corresponding base
  modified_base (19)..(19): 2'-hydroxy corresponding base
  modified_base (20)..(20): deoxythymidine
  modified_base (21)..(21): 5'-thio thymidine
cgugcccuucccuuggcagtt

SEQ ID NO: 425 - DNA, 21 bp, Artificial Sequence
  Description of Artificial Sequence: Synthetic oligonucleotide
  Description of Combined DNA/RNA Molecule: Synthetic oligonucleotide
  siRNAs to PCSK9
  modified_base (1)..(1): 2'-hydroxy corresponding base
  modified_base (2)..(2): 2'-hydroxy corresponding base
  modified_base (3)..(3): 2'-hydroxy corresponding base
  modified_base (4)..(4): 2'-hydroxy corresponding base
  modified_base (5)..(5): 2'-hydroxy corresponding base
  modified_base (6)..(6): 2'-hydroxy corresponding base
  modified_base (7)..(7): 2'-hydroxy corresponding base
  modified_base (8)..(8): 2'-hydroxy corresponding base
  modified_base (9)..(9): 2'-hydroxy corresponding base
  modified_base (10)..(10): 2'-hydroxy corresponding base
  modified_base (11)..(11): 2'-hydroxy corresponding base
  modified_base (12)..(12): 2'-hydroxy corresponding base
  modified_base (13)..(13): 2'-hydroxy corresponding base
  modified_base (14)..(14): 2'-hydroxy corresponding base
  modified_base (15)..(15): 2'-hydroxy corresponding base
  modified_base (16)..(16): 2'-hydroxy corresponding base
  modified_base (17)..(17): 2'-hydroxy corresponding base
  modified_base (18)..(18): 2'-hydroxy corresponding base
  modified_base (19)..(19): 2'-hydroxy corresponding base
  modified_base (20)..(20): deoxythymidine
  modified_base (21)..(21): deoxythymidine
caagggaagggcacgguuatt

SEQ ID NO: 426 - DNA, 21 bp, Artificial Sequence
  Description of Artificial Sequence: Synthetic oligonucleotide
  Description of Combined DNA/RNA Molecule: Synthetic oligonucleotide
  siRNAs to PCSK9
  modified_base (1)..(1): 2'-hydroxy corresponding base
  modified_base (2)..(2): 2'-hydroxy corresponding base
  modified_base (3)..(3): 2'-hydroxy corresponding base
  modified_base (4)..(4): 2'-hydroxy corresponding base
  modified_base (5)..(5): 2'-hydroxy corresponding base
  modified_base (6)..(6): 2'-hydroxy corresponding base
  modified_base (7)..(7): 2'-hydroxy corresponding base
  modified_base (8)..(8): 2'-hydroxy corresponding base
  modified_base (9)..(9): 2'-hydroxy corresponding base
  modified_base (10)..(10): 2'-hydroxy corresponding base
  modified_base (11)..(11): 2'-hydroxy corresponding base
  modified_base (12)..(12): 2'-hydroxy corresponding base
  modified_base (13)..(13): 2'-hydroxy corresponding base
  modified_base (14)..(14): 2'-hydroxy corresponding base
  modified_base (15)..(15): 2'-hydroxy corresponding base
  modified_base (16)..(16): 2'-hydroxy corresponding base
  modified_base (17)..(17): 2'-hydroxy corresponding base
  modified_base (18)..(18): 2'-hydroxy corresponding base
  modified_base (19)..(19): 2'-hydroxy corresponding base
  modified_base (20)..(20): deoxythymidine
  modified_base (21)..(21): deoxythymidine
uaaccgugcccuucccuugtt

SEQ ID NO: 427 - DNA, 21 bp, Artificial Sequence
  Description of Artificial Sequence: Synthetic oligonucleotide
  Description of Combined DNA/RNA Molecule: Synthetic oligonucleotide
  siRNAs to PCSK9
  modified_base (1)..(1): 2'-hydroxy corresponding base
  modified_base (2)..(2): 2'-hydroxy corresponding base
  modified_base (3)..(3): 2'-hydroxy corresponding base
  modified_base (4)..(4): 2'-hydroxy corresponding base
  modified_base (5)..(5): 2'-hydroxy corresponding base
  modified_base (6)..(6): 2'-hydroxy corresponding base
  modified_base (7)..(7): 2'-hydroxy corresponding base
  modified_base (8)..(8): 2'-hydroxy corresponding base
  modified_base (9)..(9): 2'-hydroxy corresponding base
  modified_base (10)..(10): 2'-hydroxy corresponding base
  modified_base (11)..(11): 2'-hydroxy corresponding base
  modified_base (12)..(12): 2'-hydroxy corresponding base
  modified_base (13)..(13): 2'-hydroxy corresponding base
  modified_base (14)..(14): 2'-hydroxy corresponding base
  modified_base (15)..(15): 2'-hydroxy corresponding base
  modified_base (16)..(16): 2'-hydroxy corresponding base
  modified_base (17)..(17): 2'-hydroxy corresponding base
  modified_base (18)..(18): 2'-hydroxy corresponding base
  modified_base (19)..(19): 2'-hydroxy corresponding base
  modified_base (20)..(20): deoxythymidine
  modified_base (21)..(21): deoxythymidine
aagggaagggcacgguuagtt

SEQ ID NO: 428 - DNA, 21 bp, Artificial Sequence
  Description of Artificial Sequence: Synthetic oligonucleotide
  Description of Combined DNA/RNA Molecule: Synthetic oligonucleotide
  siRNAs to PCSK9
  modified_base (1)..(1): 2'-hydroxy corresponding base
  modified_base (2)..(2): 2'-hydroxy corresponding base
  modified_base (3)..(3): 2'-hydroxy corresponding base
  modified_base (4)..(4): 2'-hydroxy corresponding base
  modified_base (5)..(5): 2'-hydroxy corresponding base
  modified_base (6)..(6): 2'-hydroxy corresponding base
  modified_base (7)..(7): 2'-hydroxy corresponding base
  modified_base (8)..(8): 2'-hydroxy corresponding base
  modified_base (9)..(9): 2'-hydroxy corresponding base
  modified_base (10)..(10): 2'-hydroxy corresponding base
  modified_base (11)..(11): 2'-hydroxy corresponding base
  modified_base (12)..(12): 2'-hydroxy corresponding base
  modified_base (13)..(13): 2'-hydroxy corresponding base
  modified_base (14)..(14): 2'-hydroxy corresponding base
  modified_base (15)..(15): 2'-hydroxy corresponding base
  modified_base (16)..(16): 2'-hydroxy corresponding base
  modified_base (17)..(17): 2'-hydroxy corresponding base
  modified_base (18)..(18): 2'-hydroxy corresponding base
  modified_base (19)..(19): 2'-hydroxy corresponding base
  modified_base (20)..(20): deoxythymidine
  modified_base (21)..(21): deoxythymidine
cuaaccgugcccuucccuutt

SEQ ID NO: 429 - DNA, 21 bp, Artificial Sequence
  Description of Artificial Sequence: Synthetic oligonucleotide
  Description of Combined DNA/RNA Molecule: Synthetic oligonucleotide
  siRNAs to PCSK9
  modified_base (1)..(1): 2'-hydroxy corresponding base
  modified_base (2)..(2): 2'-hydroxy corresponding base
  modified_base (3)..(3): 2'-hydroxy corresponding base
  modified_base (4)..(4): 2'-hydroxy corresponding base
  modified_base (5)..(5): 2'-hydroxy corresponding base
  modified_base (6)..(6): 2'-hydroxy corresponding base
  modified_base (7)..(7): 2'-hydroxy corresponding base
  modified_base (8)..(8): 2'-hydroxy corresponding base
  modified_base (9)..(9): 2'-hydroxy corresponding base
  modified_base (10)..(10): 2'-hydroxy corresponding base
  modified_base (11)..(11): 2'-hydroxy corresponding base
  modified_base (12)..(12): 2'-hydroxy corresponding base
  modified_base (13)..(13): 2'-hydroxy corresponding base
  modified_base (14)..(14): 2'-hydroxy corresponding base
  modified_base (15)..(15): 2'-hydroxy corresponding base
  modified_base (16)..(16): 2'-hydroxy corresponding base
  modified_base (17)..(17): 2'-hydroxy corresponding base
  modified_base (18)..(18): 2'-hydroxy corresponding base
  modified_base (19)..(19): 2'-hydroxy corresponding base
  modified_base (20)..(20): deoxythymidine
  modified_base (21)..(21): deoxythymidine
agggaagggcacgguuagctt

SEQ ID NO: 430 - DNA, 21 bp, Artificial Sequence
  Description of Artificial Sequence: Synthetic oligonucleotide
  Description of Combined DNA/RNA Molecule: Synthetic oligonucleotide
  siRNAs to PCSK9
  modified_base (1)..(1): 2'-hydroxy corresponding base
  modified_base (2)..(2): 2'-hydroxy corresponding base
  modified_base (3)..(3): 2'-hydroxy corresponding base
  modified_base (4)..(4): 2'-hydroxy corresponding base
  modified_base (5)..(5): 2'-hydroxy corresponding base
  modified_base (6)..(6): 2'-hydroxy corresponding base
  modified_base (7)..(7): 2'-hydroxy corresponding base
  modified_base (8)..(8): 2'-hydroxy corresponding base
  modified_base (9)..(9): 2'-hydroxy corresponding base
  modified_base (10)..(10): 2'-hydroxy corresponding base
  modified_base (11)..(11): 2'-hydroxy corresponding base
  modified_base (12)..(12): 2'-hydroxy corresponding base
  modified_base (13)..(13): 2'-hydroxy corresponding base
  modified_base (14)..(14): 2'-hydroxy corresponding base
  modified_base (15)..(15): 2'-hydroxy corresponding base
  modified_base (16)..(16): 2'-hydroxy corresponding base
  modified_base (17)..(17): 2'-hydroxy corresponding base
  modified_base (18)..(18): 2'-hydroxy corresponding base
  modified_base (19)..(19): 2'-hydroxy corresponding base
  modified_base (20)..(20): deoxythymidine
  modified_base (21)..(21): deoxythymidine
gcuaaccgugcccuucccutt

SEQ ID NO: 431 - DNA, 21 bp, Artificial Sequence
  Description of Artificial Sequence: Synthetic oligonucleotide
  Description of Combined DNA/RNA Molecule: Synthetic oligonucleotide
  siRNAs to PCSK9
  modified_base (1)..(1): 2'-hydroxy corresponding base
  modified_base (2)..(2): 2'-hydroxy corresponding base
  modified_base (3)..(3): 2'-hydroxy corresponding base
  modified_base (4)..(4): 2'-hydroxy corresponding base
  modified_base (5)..(5): 2'-hydroxy corresponding base
  modified_base (6)..(6): 2'-hydroxy corresponding base
  modified_base (7)..(7): 2'-hydroxy corresponding base
  modified_base (8)..(8): 2'-hydroxy corresponding base
  modified_base (9)..(9): 2'-hydroxy corresponding base
  modified_base (10)..(10): 2'-hydroxy corresponding base
  modified_base (11)..(11): 2'-hydroxy corresponding base
  modified_base (12)..(12): 2'-hydroxy corresponding base
  modified_base (13)..(13): 2'-hydroxy corresponding base
  modified_base (14)..(14): 2'-hydroxy corresponding base
  modified_base (15)..(15): 2'-hydroxy corresponding base
  modified_base (16)..(16): 2'-hydroxy corresponding base
  modified_base (17)..(17): 2'-hydroxy corresponding base
  modified_base (18)..(18): 2'-hydroxy corresponding base
  modified_base (19)..(19): 2'-hydroxy corresponding base
  modified_base (20)..(20): deoxythymidine
  modified_base (21)..(21): deoxythymidine
gggaagggcacgguuagcgtt

SEQ ID NO: 432 - DNA, 21 bp, Artificial Sequence
  Description of Artificial Sequence: Synthetic oligonucleotide
  Description of Combined DNA/RNA Molecule: Synthetic oligonucleotide
  siRNAs to PCSK9
  modified_base (1)..(1): 2'-hydroxy corresponding base
  modified_base (2)..(2): 2'-hydroxy corresponding base
  modified_base (3)..(3): 2'-hydroxy corresponding base
  modified_base (4)..(4): 2'-hydroxy corresponding base
  modified_base (5)..(5): 2'-hydroxy corresponding base
  modified_base (6)..(6): 2'-hydroxy corresponding base
  modified_base (7)..(7): 2'-hydroxy corresponding base
  modified_base (8)..(8): 2'-hydroxy corresponding base
  modified_base (9)..(9): 2'-hydroxy corresponding base
  modified_base (10)..(10): 2'-hydroxy corresponding base
  modified_base (11)..(11): 2'-hydroxy corresponding base
  modified_base (12)..(12): 2'-hydroxy corresponding base
  modified_base (13)..(13): 2'-hydroxy corresponding base
  modified_base (14)..(14): 2'-hydroxy corresponding base
  modified_base (15)..(15): 2'-hydroxy corresponding base
  modified_base (16)..(16): 2'-hydroxy corresponding base
  modified_base (17)..(17): 2'-hydroxy corresponding base
  modified_base (18)..(18): 2'-hydroxy corresponding base
  modified_base (19)..(19): 2'-hydroxy corresponding base
  modified_base (20)..(20): deoxythymidine
  modified_base (21)..(21): deoxythymidine
cgcuaaccgugcccuuccctt

SEQ ID NO: 433 - DNA, 21 bp, Artificial Sequence
  Description of Artificial Sequence: Synthetic oligonucleotide
  Description of Combined DNA/RNA Molecule: Synthetic oligonucleotide
  siRNAs to PCSK9
  modified_base (1)..(1): 2'-hydroxy corresponding base
  modified_base (2)..(2): 2'-hydroxy corresponding base
  modified_base (3)..(3): 2'-hydroxy corresponding base
  modified_base (4)..(4): 2'-hydroxy corresponding base
  modified_base (5)..(5): 2'-hydroxy corresponding base
  modified_base (6)..(6): 2'-hydroxy corresponding base
  modified_base (7)..(7): 2'-hydroxy corresponding base
  modified_base (8)..(8): 2'-hydroxy corresponding base
  modified_base (9)..(9): 2'-hydroxy corresponding base
  modified_base (10)..(10): 2'-hydroxy corresponding base
  modified_base (11)..(11): 2'-hydroxy corresponding base
  modified_base (12)..(12): 2'-hydroxy corresponding base
  modified_base (13)..(13): 2'-hydroxy corresponding base
  modified_base (14)..(14): 2'-hydroxy corresponding base
  modified_base (15)..(15): 2'-hydroxy corresponding base
  modified_base (16)..(16): 2'-hydroxy corresponding base
  modified_base (17)..(17): 2'-hydroxy corresponding base
  modified_base (18)..(18): 2'-hydroxy corresponding base
  modified_base (19)..(19): 2'-hydroxy corresponding base
  modified_base (20)..(20): deoxythymidine
  modified_base (21)..(21): deoxythymidine
ggaagggcacgguuagcggtt

SEQ ID NO: 434 - DNA, 21 bp, Artificial Sequence
  Description of Artificial Sequence: Synthetic oligonucleotide
  Description of Combined DNA/RNA Molecule: Synthetic oligonucleotide
  siRNAs to PCSK9
  modified_base (1)..(1): 2'-hydroxy corresponding base
  modified_base (2)..(2): 2'-hydroxy corresponding base
  modified_base (3)..(3): 2'-hydroxy corresponding base
  modified_base (4)..(4): 2'-hydroxy corresponding base
  modified_base (5)..(5): 2'-hydroxy corresponding base
  modified_base (6)..(6): 2'-hydroxy corresponding base
  modified_base (7)..(7): 2'-hydroxy corresponding base
  modified_base (8)..(8): 2'-hydroxy corresponding base
  modified_base (9)..(9): 2'-hydroxy corresponding base
  modified_base (10)..(10): 2'-hydroxy corresponding base
  modified_base (11)..(11): 2'-hydroxy corresponding base
  modified_base (12)..(12): 2'-hydroxy corresponding base
  modified_base (13)..(13): 2'-hydroxy corresponding base
  modified_base (14)..(14): 2'-hydroxy corresponding base
  modified_base (15)..(15): 2'-hydroxy corresponding base
  modified_base (16)..(16): 2'-hydroxy corresponding base
  modified_base (17)..(17): 2'-hydroxy corresponding base
  modified_base (18)..(18): 2'-hydroxy corresponding base
  modified_base (19)..(19): 2'-hydroxy corresponding base
  modified_base (20)..(20): deoxythymidine
  modified_base (21)..(21): deoxythymidine
ccgcuaaccgugcccuucctt

SEQ ID NO: 435 - DNA, 21 bp, Artificial Sequence
  Description of Artificial Sequence: Synthetic oligonucleotide
  Description of Combined DNA/RNA Molecule: Synthetic oligonucleotide
  siRNAs to PCSK9
  modified_base (1)..(1): 2'-hydroxy corresponding base
  modified_base (2)..(2): 2'-hydroxy corresponding base
  modified_base (3)..(3): 2'-hydroxy corresponding base
  modified_base (4)..(4): 2'-hydroxy corresponding base
  modified_base (5)..(5): 2'-hydroxy corresponding base
  modified_base (6)..(6): 2'-hydroxy corresponding base
  modified_base (7)..(7): 2'-hydroxy corresponding base
  modified_base (8)..(8): 2'-hydroxy corresponding base
  modified_base (9)..(9): 2'-hydroxy corresponding base
  modified_base (10)..(10): 2'-hydroxy corresponding base
  modified_base (11)..(11): 2'-hydroxy corresponding base
  modified_base (12)..(12): 2'-hydroxy corresponding base
  modified_base (13)..(13): 2'-hydroxy corresponding base
  modified_base (14)..(14): 2'-hydroxy corresponding base
  modified_base (15)..(15): 2'-hydroxy corresponding base
  modified_base (16)..(16): 2'-hydroxy corresponding base
  modified_base (17)..(17): 2'-hydroxy corresponding base
  modified_base (18)..(18): 2'-hydroxy corresponding base
  modified_base (19)..(19): 2'-hydroxy corresponding base
  modified_base (20)..(20): deoxythymidine
  modified_base (21)..(21): deoxythymidine
gaagggcacgguuagcggctt

SEQ ID NO: 436 - DNA, 21 bp, Artificial Sequence
  Description of Artificial Sequence: Synthetic oligonucleotide
  Description of Combined DNA/RNA Molecule: Synthetic oligonucleotide
  siRNAs to PCSK9
  modified_base (1)..(1): 2'-hydroxy corresponding base
  modified_base (2)..(2): 2'-hydroxy corresponding base
  modified_base (3)..(3): 2'-hydroxy corresponding base
  modified_base (4)..(4): 2'-hydroxy corresponding base
  modified_base (5)..(5): 2'-hydroxy corresponding base
  modified_base (6)..(6): 2'-hydroxy corresponding base
  modified_base (7)..(7): 2'-hydroxy corresponding base
  modified_base (8)..(8): 2'-hydroxy corresponding base
  modified_base (9)..(9): 2'-hydroxy corresponding base
  modified_base (10)..(10): 2'-hydroxy corresponding base
  modified_base (11)..(11): 2'-hydroxy corresponding base
  modified_base (12)..(12): 2'-hydroxy corresponding base
  modified_base (13)..(13): 2'-hydroxy corresponding base
  modified_base (14)..(14): 2'-hydroxy corresponding base
  modified_base (15)..(15): 2'-hydroxy corresponding base
  modified_base (16)..(16): 2'-hydroxy corresponding base
  modified_base (17)..(17): 2'-hydroxy corresponding base
  modified_base (18)..(18): 2'-hydroxy corresponding base
  modified_base (19)..(19): 2'-hydroxy corresponding base
  modified_base (20)..(20): deoxythymidine
  modified_base (21)..(21): deoxythymidine
gccgcuaaccgugcccuuctt

SEQ ID NO: 437 - DNA, 21 bp, Artificial Sequence
  Description of Artificial Sequence: Synthetic oligonucleotide
  Description of Combined DNA/RNA Molecule: Synthetic oligonucleotide
  siRNAs to PCSK9
  modified_base (1)..(1): 2'-hydroxy corresponding base
  modified_base (2)..(2): 2'-hydroxy corresponding base
  modified_base (3)..(3): 2'-hydroxy corresponding base
  modified_base (4)..(4): 2'-hydroxy corresponding base
  modified_base (5)..(5): 2'-hydroxy corresponding base
  modified_base (6)..(6): 2'-hydroxy corresponding base
  modified_base (7)..(7): 2'-hydroxy corresponding base
  modified_base (8)..(8): 2'-hydroxy corresponding base
  modified_base (9)..(9): 2'-hydroxy corresponding base
  modified_base (10)..(10): 2'-hydroxy corresponding base
  modified_base (11)..(11): 2'-hydroxy corresponding base
  modified_base (12)..(12): 2'-hydroxy corresponding base
  modified_base (13)..(13): 2'-hydroxy corresponding base
  modified_base (14)..(14): 2'-hydroxy corresponding base
  modified_base (15)..(15): 2'-hydroxy corresponding base
  modified_base (16)..(16): 2'-hydroxy corresponding base
  modified_base (17)..(17): 2'-hydroxy corresponding base
  modified_base (18)..(18): 2'-hydroxy corresponding base
  modified_base (19)..(19): 2'-hydroxy corresponding base
  modified_base (20)..(20): deoxythymidine
  modified_base (21)..(21): deoxythymidine
aagggcacgguuagcggcatt

SEQ ID NO: 438 - DNA, 21 bp, Artificial Sequence
  Description of Artificial Sequence: Synthetic oligonucleotide
  Description of Combined DNA/RNA Molecule: Synthetic oligonucleotide
  siRNAs to PCSK9
  modified_base (1)..(1): 2'-hydroxy corresponding base
  modified_base (2)..(2): 2'-hydroxy corresponding base
  modified_base (3)..(3): 2'-hydroxy corresponding base
  modified_base (4)..(4): 2'-hydroxy corresponding base
  modified_base (5)..(5): 2'-hydroxy corresponding base
  modified_base (6)..(6): 2'-hydroxy corresponding base
  modified_base (7)..(7): 2'-hydroxy corresponding base
  modified_base (8)..(8): 2'-hydroxy corresponding base
  modified_base (9)..(9): 2'-hydroxy corresponding base
  modified_base (10)..(10): 2'-hydroxy corresponding base
  modified_base (11)..(11): 2'-hydroxy corresponding base
  modified_base (12)..(12): 2'-hydroxy corresponding base
  modified_base (13)..(13): 2'-hydroxy corresponding base
  modified_base (14)..(14): 2'-hydroxy corresponding base
  modified_base (15)..(15): 2'-hydroxy corresponding base
  modified_base (16)..(16): 2'-hydroxy corresponding base
  modified_base (17)..(17): 2'-hydroxy corresponding base
  modified_base (18)..(18): 2'-hydroxy corresponding base
  modified_base (19)..(19): 2'-hydroxy corresponding base
  modified_base (20)..(20): deoxythymidine
  modified_base (21)..(21): deoxythymidine
ugccgcuaaccgugcccuutt

SEQ ID NO: 439 - DNA, 21 bp, Artificial Sequence
  Description of Artificial Sequence: Synthetic oligonucleotide
  Description of Combined DNA/RNA Molecule: Synthetic oligonucleotide
  siRNAs to PCSK9
  modified_base (1)..(1): 2'-hydroxy corresponding base
  modified_base (2)..(2): 2'-hydroxy corresponding base
  modified_base (3)..(3): 2'-hydroxy corresponding base
  modified_base (4)..(4): 2'-hydroxy corresponding base
  modified_base (5)..(5): 2'-hydroxy corresponding base
  modified_base (6)..(6): 2'-hydroxy corresponding base
  modified_base (7)..(7): 2'-hydroxy corresponding base
  modified_base (8)..(8): 2'-hydroxy corresponding base
  modified_base (9)..(9): 2'-hydroxy corresponding base
  modified_base (10)..(10): 2'-hydroxy corresponding base
  modified_base (11)..(11): 2'-hydroxy corresponding base
  modified_base (12)..(12): 2'-hydroxy corresponding base
  modified_base (13)..(13): 2'-hydroxy corresponding base
  modified_base (14)..(14): 2'-hydroxy corresponding base
  modified_base (15)..(15): 2'-hydroxy corresponding base
  modified_base (16)..(16): 2'-hydroxy corresponding base
  modified_base (17)..(17): 2'-hydroxy corresponding base
  modified_base (18)..(18): 2'-hydroxy corresponding base
  modified_base (19)..(19): 2'-hydroxy corresponding base
  modified_base (20)..(20): deoxythymidine
  modified_base (21)..(21): deoxythymidine
agggcacgguuagcggcactt

SEQ ID NO: 440 - DNA, 21 bp, Artificial Sequence
  Description of Artificial Sequence: Synthetic oligonucleotide
  Description of Combined DNA/RNA Molecule: Synthetic oligonucleotide
  siRNAs to PCSK9
  modified_base (1)..(1): 2'-hydroxy corresponding base
  modified_base (2)..(2): 2'-hydroxy corresponding base
  modified_base (3)..(3): 2'-hydroxy corresponding base
  modified_base (4)..(4): 2'-hydroxy corresponding base
  modified_base (5)..(5): 2'-hydroxy corresponding base
  modified_base (6)..(6): 2'-hydroxy corresponding base
  modified_base (7)..(7): 2'-hydroxy corresponding base
  modified_base (8)..(8): 2'-hydroxy corresponding base
  modified_base (9)..(9): 2'-hydroxy corresponding base
  modified_base (10)..(10): 2'-hydroxy corresponding base
  modified_base (11)..(11): 2'-hydroxy corresponding base
  modified_base (12)..(12): 2'-hydroxy corresponding base
  modified_base (13)..(13): 2'-hydroxy corresponding base
  modified_base (14)..(14): 2'-hydroxy corresponding base
  modified_base (15)..(15): 2'-hydroxy corresponding base
  modified_base (16)..(16): 2'-hydroxy corresponding base
  modified_base (17)..(17): 2'-hydroxy corresponding base
  modified_base (18)..(18): 2'-hydroxy corresponding base
  modified_base (19)..(19): 2'-hydroxy corresponding base
  modified_base (20)..(20): deoxythymidine
  modified_base (21)..(21): deoxythymidine
gugccgcuaaccgugcccutt

SEQ ID NO: 441 - DNA, 21 bp, Artificial Sequence
  Description of Artificial Sequence: Synthetic oligonucleotide
  Description of Combined DNA/RNA Molecule: Synthetic oligonucleotide
  siRNAs to PCSK9
  modified_base (1)..(1): 2'-hydroxy corresponding base
  modified_base (2)..(2): 2'-hydroxy corresponding base
  modified_base (3)..(3): 2'-hydroxy corresponding base
  modified_base (4)..(4): 2'-hydroxy corresponding base
  modified_base (5)..(5): 2'-hydroxy corresponding base
  modified_base (6)..(6): 2'-hydroxy corresponding base
  modified_base (7)..(7): 2'-hydroxy corresponding base
  modified_base (8)..(8): 2'-hydroxy corresponding base
  modified_base (9)..(9): 2'-hydroxy corresponding base
  modified_base (10)..(10): 2'-hydroxy corresponding base
  modified_base (11)..(11): 2'-hydroxy corresponding base
  modified_base (12)..(12): 2'-hydroxy corresponding base
  modified_base (13)..(13): 2'-hydroxy corresponding base
  modified_base (14)..(14): 2'-hydroxy corresponding base
  modified_base (15)..(15): 2'-hydroxy corresponding base
  modified_base (16)..(16): 2'-hydroxy corresponding base
  modified_base (17)..(17): 2'-hydroxy corresponding base
  modified_base (18)..(18): 2'-hydroxy corresponding base
  modified_base (19)..(19): 2'-hydroxy corresponding base
  modified_base (20)..(20): deoxythymidine
  modified_base (21)..(21): deoxythymidine
cacgguuagcggcacccuctt

SEQ ID NO: 442 - DNA, 21 bp, Artificial Sequence
  Description of Artificial Sequence: Synthetic oligonucleotide
  Description of Combined DNA/RNA Molecule: Synthetic oligonucleotide
  siRNAs to PCSK9
  modified_base (1)..(1): 2'-hydroxy corresponding base
  modified_base (2)..(2): 2'-hydroxy corresponding base
  modified_base (3)..(3): 2'-hydroxy corresponding base
  modified_base (4)..(4): 2'-hydroxy corresponding base
  modified_base (5)..(5): 2'-hydroxy corresponding base
  modified_base (6)..(6): 2'-hydroxy corresponding base
  modified_base (7)..(7): 2'-hydroxy corresponding base
  modified_base (8)..(8): 2'-hydroxy corresponding base
  modified_base (9)..(9): 2'-hydroxy corresponding base
  modified_base (10)..(10): 2'-hydroxy corresponding base
  modified_base (11)..(11): 2'-hydroxy corresponding base
  modified_base (12)..(12): 2'-hydroxy corresponding base
  modified_base (13)..(13): 2'-hydroxy corresponding base
  modified_base (14)..(14): 2'-hydroxy corresponding base
  modified_base (15)..(15): 2'-hydroxy corresponding base
  modified_base (16)..(16): 2'-hydroxy corresponding base
  modified_base (17)..(17): 2'-hydroxy corresponding base
  modified_base (18)..(18): 2'-hydroxy corresponding base
  modified_base (19)..(19): 2'-hydroxy corresponding base
  modified_base (20)..(20): deoxythymidine
  modified_base (21)..(21): deoxythymidine
gagggugccgcuaaccgugtt

SEQ ID NO: 443 - DNA, 21 bp, Artificial Sequence
  Description of Artificial Sequence: Synthetic oligonucleotide
  Description of Combined DNA/RNA Molecule: Synthetic oligonucleotide
  siRNAs to PCSK9
  modified_base (1)..(1): 2'-hydroxy corresponding base
  modified_base (2)..(2): 2'-hydroxy corresponding base
  modified_base (3)..(3): 2'-hydroxy corresponding base
  modified_base (4)..(4): 2'-hydroxy corresponding base
  modified_base (5)..(5): 2'-hydroxy corresponding base
  modified_base (6)..(6): 2'-hydroxy corresponding base
  modified_base (7)..(7): 2'-hydroxy corresponding base
  modified_base (8)..(8): 2'-hydroxy corresponding base
  modified_base (9)..(9): 2'-hydroxy corresponding base
  modified_base (10)..(10): 2'-hydroxy corresponding base
  modified_base (11)..(11): 2'-hydroxy corresponding base
  modified_base (12)..(12): 2'-hydroxy corresponding base
  modified_base (13)..(13): 2'-hydroxy corresponding base
  modified_base (14)..(14): 2'-hydroxy corresponding base
  modified_base (15)..(15): 2'-hydroxy corresponding base
  modified_base (16)..(16): 2'-hydroxy corresponding base
  modified_base (17)..(17): 2'-hydroxy corresponding base
  modified_base (18)..(18): 2'-hydroxy corresponding base
  modified_base (19)..(19): 2'-hydroxy corresponding base
  modified_base (20)..(20): deoxythymidine
  modified_base (21)..(21): deoxythymidine
acgguuagcggcacccucatt

SEQ ID NO: 444 - DNA, 21 bp, Artificial Sequence
  Description of Artificial Sequence: Synthetic oligonucleotide
  Description of Combined DNA/RNA Molecule: Synthetic oligonucleotide
  siRNAs to PCSK9
  modified_base (1)..(1): 2'-hydroxy corresponding base
  modified_base (2)..(2): 2'-hydroxy corresponding base
  modified_base (3)..(3): 2'-hydroxy corresponding base
  modified_base (4)..(4): 2'-hydroxy corresponding base
  modified_base (5)..(5): 2'-hydroxy corresponding base
  modified_base (6)..(6): 2'-hydroxy corresponding base
  modified_base (7)..(7): 2'-hydroxy corresponding base
  modified_base (8)..(8): 2'-hydroxy corresponding base
  modified_base (9)..(9): 2'-hydroxy corresponding base
  modified_base (10)..(10): 2'-hydroxy corresponding base
  modified_base (11)..(11): 2'-hydroxy corresponding base
  modified_base (12)..(12): 2'-hydroxy corresponding base
  modified_base (13)..(13): 2'-hydroxy corresponding base
  modified_base (14)..(14): 2'-hydroxy corresponding base
  modified_base (15)..(15): 2'-hydroxy corresponding base
  modified_base (16)..(16): 2'-hydroxy corresponding base
  modified_base (17)..(17): 2'-hydroxy corresponding base
  modified_base (18)..(18): 2'-hydroxy corresponding base
  modified_base (19)..(19): 2'-hydroxy corresponding base
  modified_base (20)..(20): deoxythymidine
  modified_base (21)..(21): deoxythymidine
ugagggugccgcuaaccgutt

SEQ ID NO: 445 - DNA, 21 bp, Artificial Sequence
  Description of Artificial Sequence: Synthetic oligonucleotide
  Description of Combined DNA/RNA Molecule: Synthetic oligonucleotide
  siRNAs to PCSK9
  modified_base (1)..(1): 2'-hydroxy corresponding base
  modified_base (2)..(2): 2'-hydroxy corresponding base
  modified_base (3)..(3): 2'-hydroxy corresponding base
  modified_base (4)..(4): 2'-hydroxy corresponding base
  modified_base (5)..(5): 2'-hydroxy corresponding base
  modified_base (6)..(6): 2'-hydroxy corresponding base
  modified_base (7)..(7): 2'-hydroxy corresponding base
  modified_base (8)..(8): 2'-hydroxy corresponding base
  modified_base (9)..(9): 2'-hydroxy corresponding base
  modified_base (10)..(10): 2'-hydroxy corresponding base
  modified_base (11)..(11): 2'-hydroxy corresponding base
  modified_base (12)..(12): 2'-hydroxy corresponding base
  modified_base (13)..(13): 2'-hydroxy corresponding base
  modified_base (14)..(14): 2'-hydroxy corresponding base
  modified_base (15)..(15): 2'-hydroxy corresponding base
  modified_base (16)..(16): 2'-hydroxy corresponding base
  modified_base (17)..(17): 2'-hydroxy corresponding base
  modified_base (18)..(18): 2'-hydroxy corresponding base
  modified_base (19)..(19): 2'-hydroxy corresponding base
  modified_base (20)..(20): deoxythymidine
  modified_base (21)..(21): deoxythymidine
guuagcggcacccucauagtt

SEQ ID NO: 446 - DNA, 21 bp, Artificial Sequence
  Description of Artificial Sequence: Synthetic oligonucleotide
  Description of Combined DNA/RNA Molecule: Synthetic oligonucleotide
  siRNAs to PCSK9
  modified_base (1)..(1): 2'-hydroxy corresponding base
  modified_base (2)..(2): 2'-hydroxy corresponding base
  modified_base (3)..(3): 2'-hydroxy corresponding base
  modified_base (4)..(4): 2'-hydroxy corresponding base
  modified_base (5)..(5): 2'-hydroxy corresponding base
  modified_base (6)..(6): 2'-hydroxy corresponding base
  modified_base (7)..(7): 2'-hydroxy corresponding base
  modified_base (8)..(8): 2'-hydroxy corresponding base
  modified_base (9)..(9): 2'-hydroxy corresponding base
  modified_base (10)..(10): 2'-hydroxy corresponding base
  modified_base (11)..(11): 2'-hydroxy corresponding base
  modified_base (12)..(12): 2'-hydroxy corresponding base
  modified_base (13)..(13): 2'-hydroxy corresponding base
  modified_base (14)..(14): 2'-hydroxy corresponding base
  modified_base (15)..(15): 2'-hydroxy corresponding base
  modified_base (16)..(16): 2'-hydroxy corresponding base
  modified_base (17)..(17): 2'-hydroxy corresponding base
  modified_base (18)..(18): 2'-hydroxy corresponding base
  modified_base (19)..(19): 2'-hydroxy corresponding base
  modified_base (20)..(20): deoxythymidine
  modified_base (21)..(21): deoxythymidine
cuaugagggugccgcuaactt

SEQ ID NO: 447 - DNA, 21 bp, Artificial Sequence
  Description of Artificial Sequence: Synthetic oligonucleotide
  Description of Combined DNA/RNA Molecule: Synthetic oligonucleotide
  siRNAs to PCSK9
  modified_base (1)..(1): 2'-hydroxy corresponding base
  modified_base (2)..(2): 2'-hydroxy corresponding base
  modified_base (3)..(3): 2'-hydroxy corresponding base
  modified_base (4)..(4): 2'-hydroxy corresponding base
  modified_base (5)..(5): 2'-hydroxy corresponding base
  modified_base (6)..(6): 2'-hydroxy corresponding base
  modified_base (7)..(7): 2'-hydroxy corresponding base
  modified_base (8)..(8): 2'-hydroxy corresponding base
  modified_base (9)..(9): 2'-hydroxy corresponding base
  modified_base (10)..(10): 2'-hydroxy corresponding base
  modified_base (11)..(11): 2'-hydroxy corresponding base
  modified_base (12)..(12): 2'-hydroxy corresponding base
  modified_base (13)..(13): 2'-hydroxy corresponding base
  modified_base (14)..(14): 2'-hydroxy corresponding base
  modified_base (15)..(15): 2'-hydroxy corresponding base
  modified_base (16)..(16): 2'-hydroxy corresponding base
  modified_base (17)..(17): 2'-hydroxy corresponding base
  modified_base (18)..(18): 2'-hydroxy corresponding base
  modified_base (19)..(19): 2'-hydroxy corresponding base
  modified_base (20)..(20): deoxythymidine
  modified_base (21)..(21): deoxythymidine
uuagcggcacccucauaggtt

SEQ ID NO: 448 - DNA, 21 bp, Artificial Sequence
  Description of Artificial Sequence: Synthetic oligonucleotide
  Description of Combined DNA/RNA Molecule: Synthetic oligonucleotide
  siRNAs to PCSK9
  modified_base (1)..(1): 2'-hydroxy corresponding base
  modified_base (2)..(2): 2'-hydroxy corresponding base
  modified_base (3)..(3): 2'-hydroxy corresponding base
  modified_base (4)..(4): 2'-hydroxy corresponding base
  modified_base (5)..(5): 2'-hydroxy corresponding base
  modified_base (6)..(6): 2'-hydroxy corresponding base
  modified_base (7)..(7): 2'-hydroxy corresponding base
  modified_base (8)..(8): 2'-hydroxy corresponding base
  modified_base (9)..(9): 2'-hydroxy corresponding base
  modified_base (10)..(10): 2'-hydroxy corresponding base
  modified_base (11)..(11): 2'-hydroxy corresponding base
  modified_base (12)..(12): 2'-hydroxy corresponding base
  modified_base (13)..(13): 2'-hydroxy corresponding base
  modified_base (14)..(14): 2'-hydroxy corresponding base
  modified_base (15)..(15): 2'-hydroxy corresponding base
  modified_base (16)..(16): 2'-hydroxy corresponding base
  modified_base (17)..(17): 2'-hydroxy corresponding base
  modified_base (18)..(18): 2'-hydroxy corresponding base
  modified_base (19)..(19): 2'-hydroxy corresponding base
  modified_base (20)..(20): deoxythymidine
  modified_base (21)..(21): deoxythymidine
ccuaugagggugccgcuaatt

SEQ ID NO: 449 - DNA, 21 bp, Artificial Sequence
  Description of Artificial Sequence: Synthetic oligonucleotide
  Description of Combined DNA/RNA Molecule: Synthetic oligonucleotide
  siRNAs to PCSK9
  modified_base (1)..(1): 2'-hydroxy corresponding base
  modified_base (2)..(2): 2'-hydroxy corresponding base
  modified_base (3)..(3): 2'-hydroxy corresponding base
  modified_base (4)..(4): 2'-hydroxy corresponding base
  modified_base (5)..(5): 2'-hydroxy corresponding base
  modified_base (6)..(6): 2'-hydroxy corresponding base
  modified_base (7)..(7): 2'-hydroxy corresponding base
  modified_base (8)..(8): 2'-hydroxy corresponding base
  modified_base (9)..(9): 2'-hydroxy corresponding base
  modified_base (10)..(10): 2'-hydroxy corresponding base
  modified_base (11)..(11): 2'-hydroxy corresponding base
  modified_base (12)..(12): 2'-hydroxy corresponding base
  modified_base (13)..(13): 2'-hydroxy corresponding base
  modified_base (14)..(14): 2'-hydroxy corresponding base
  modified_base (15)..(15): 2'-hydroxy corresponding base
  modified_base (16)..(16): 2'-hydroxy corresponding base
  modified_base (17)..(17): 2'-hydroxy corresponding base
  modified_base (18)..(18): 2'-hydroxy corresponding base
  modified_base (19)..(19): 2'-hydroxy corresponding base
  modified_base (20)..(20): deoxythymidine
  modified_base (21)..(21): 5'-thio thymidine
gcggcacccucauaggccutt

SEQ ID NO: 450 - DNA, 21 bp, Artificial Sequence
  Description of Artificial Sequence: Synthetic oligonucleotide
  Description of Combined DNA/RNA Molecule: Synthetic oligonucleotide
  siRNAs to PCSK9
  modified_base (1)..(1): 2'-hydroxy corresponding base
  modified_base (2)..(2): 2'-hydroxy corresponding base
  modified_base (3)..(3): 2'-hydroxy corresponding base
  modified_base (4)..(4): 2'-hydroxy corresponding base
  modified_base (5)..(5): 2'-hydroxy corresponding base
  modified_base (6)..(6): 2'-hydroxy corresponding base
  modified_base (7)..(7): 2'-hydroxy corresponding base
  modified_base (8)..(8): 2'-hydroxy corresponding base
  modified_base (9)..(9): 2'-hydroxy corresponding base
  modified_base (10)..(10): 2'-hydroxy corresponding base
  modified_base (11)..(11): 2'-hydroxy corresponding base
  modified_base (12)..(12): 2'-hydroxy corresponding base
  modified_base (13)..(13): 2'-hydroxy corresponding base
  modified_base (14)..(14): 2'-hydroxy corresponding base
  modified_base (15)..(15): 2'-hydroxy corresponding base
  modified_base (16)..(16): 2'-hydroxy corresponding base
  modified_base (17)..(17): 2'-hydroxy corresponding base
  modified_base (18)..(18): 2'-hydroxy corresponding base
  modified_base (19)..(19): 2'-hydroxy corresponding base
  modified_base (20)..(20): deoxythymidine
  modified_base (21)..(21): 5'-thio thymidine
aggccuaugagggugccgctt

SEQ ID NO: 451 - DNA, 21 bp, Artificial Sequence
  Description of Artificial Sequence: Synthetic oligonucleotide
  Description of Combined DNA/RNA Molecule: Synthetic oligonucleotide
  siRNAs to PCSK9
  modified_base (1)..(1): 2'-hydroxy corresponding base
  modified_base (2)..(2): 2'-hydroxy corresponding base
  modified_base (3)..(3): 2'-hydroxy corresponding base
  modified_base (4)..(4): 2'-hydroxy corresponding base
  modified_base (5)..(5): 2'-hydroxy corresponding base
  modified_base (6)..(6): 2'-hydroxy corresponding base
  modified_base (7)..(7): 2'-hydroxy corresponding base
  modified_base (8)..(8): 2'-hydroxy corresponding base
  modified_base (9)..(9): 2'-hydroxy corresponding base
  modified_base (10)..(10): 2'-hydroxy corresponding base
  modified_base (11)..(11): 2'-hydroxy corresponding base
  modified_base (12)..(12): 2'-hydroxy corresponding base
  modified_base (13)..(13): 2'-hydroxy corresponding base
  modified_base (14)..(14): 2'-hydroxy corresponding base
  modified_base (15)..(15): 2'-hydroxy corresponding base
  modified_base (16)..(16): 2'-hydroxy corresponding base
  modified_base (17)..(17): 2'-hydroxy corresponding base
  modified_base (18)..(18): 2'-hydroxy corresponding base
  modified_base (19)..(19): 2'-hydroxy corresponding base
  modified_base (20)..(20): deoxythymidine
  modified_base (21)..(21): 5'-thio thymidine
gcacccucauaggccuggatt

SEQ ID NO: 452 - DNA, 21 bp, Artificial Sequence
  Description of Artificial Sequence: Synthetic oligonucleotide
  Description of Combined DNA/RNA Molecule: Synthetic oligonucleotide
  siRNAs to PCSK9
  modified_base (1)..(1): 2'-hydroxy corresponding base
  modified_base (2)..(2): 2'-hydroxy corresponding base
  modified_base (3)..(3): 2'-hydroxy corresponding base
  modified_base (4)..(4): 2'-hydroxy corresponding base
  modified_base (5)..(5): 2'-hydroxy corresponding base
  modified_base (6)..(6): 2'-hydroxy corresponding base
  modified_base (7)..(7): 2'-hydroxy corresponding base
  modified_base (8)..(8): 2'-hydroxy corresponding base
  modified_base (9)..(9): 2'-hydroxy corresponding base
  modified_base (10)..(10): 2'-hydroxy corresponding base
  modified_base (11)..(11): 2'-hydroxy corresponding base
  modified_base (12)..(12): 2'-hydroxy corresponding base
  modified_base (13)..(13): 2'-hydroxy corresponding base
  modified_base (14)..(14): 2'-hydroxy corresponding base
  modified_base (15)..(15): 2'-hydroxy corresponding base
  modified_base (16)..(16): 2'-hydroxy corresponding base
  modified_base (17)..(17): 2'-hydroxy corresponding base
  modified_base (18)..(18): 2'-hydroxy corresponding base
  modified_base (19)..(19): 2'-hydroxy corresponding base
  modified_base (20)..(20): deoxythymidine
  modified_base (21)..(21): 5'-thio thymidine
uccaggccuaugagggugctt

SEQ ID NO: 453 - DNA, 21 bp, Artificial Sequence
  Description of Artificial Sequence: Synthetic oligonucleotide
  Description of Combined DNA/RNA Molecule: Synthetic oligonucleotide
  siRNAs to PCSK9
  modified_base (1)..(1): 2'-hydroxy corresponding base
  modified_base (2)..(2): 2'-hydroxy corresponding base
  modified_base (3)..(3): 2'-hydroxy corresponding base
  modified_base (4)..(4): 2'-hydroxy corresponding base
  modified_base (5)..(5): 2'-hydroxy corresponding base
  modified_base (6)..(6): 2'-hydroxy corresponding base
  modified_base (7)..(7): 2'-hydroxy corresponding base
  modified_base (8)..(8): 2'-hydroxy corresponding base
  modified_base (9)..(9): 2'-hydroxy corresponding base
  modified_base (10)..(10): 2'-hydroxy corresponding base
  modified_base (11)..(11): 2'-hydroxy corresponding base
  modified_base (12)..(12): 2'-hydroxy corresponding base
  modified_base (13)..(13): 2'-hydroxy corresponding base
  modified_base (14)..(14): 2'-hydroxy corresponding base
  modified_base (15)..(15): 2'-hydroxy corresponding base
  modified_base (16)..(16): 2'-hydroxy corresponding base
  modified_base (17)..(17): 2'-hydroxy corresponding base
  modified_base (18)..(18): 2'-hydroxy corresponding base
  modified_base (19)..(19): 2'-hydroxy corresponding base
  modified_base (20)..(20): deoxythymidine
  modified_base (21)..(21): 5'-thio thymidine
ucauaggccuggaguuuautt

SEQ ID NO: 454 - DNA, 21 bp, Artificial Sequence
  Description of Artificial Sequence: Synthetic oligonucleotide
  Description of Combined DNA/RNA Molecule: Synthetic oligonucleotide
  siRNAs to PCSK9
  modified_base (1)..(1): 2'-hydroxy corresponding base
  modified_base (2)..(2): 2'-hydroxy corresponding base
  modified_base (3)..(3): 2'-hydroxy corresponding base
  modified_base (4)..(4): 2'-hydroxy corresponding base
  modified_base (5)..(5): 2'-hydroxy corresponding base
  modified_base (6)..(6): 2'-hydroxy corresponding base
  modified_base (7)..(7): 2'-hydroxy corresponding base
  modified_base (8)..(8): 2'-hydroxy corresponding base
  modified_base (9)..(9): 2'-hydroxy corresponding base
  modified_base (10)..(10): 2'-hydroxy corresponding base
  modified_base (11)..(11): 2'-hydroxy corresponding base
  modified_base (12)..(12): 2'-hydroxy corresponding base
  modified_base (13)..(13): 2'-hydroxy corresponding base
  modified_base (14)..(14): 2'-hydroxy corresponding base
  modified_base (15)..(15): 2'-hydroxy corresponding base
  modified_base (16)..(16): 2'-hydroxy corresponding base
  modified_base (17)..(17): 2'-hydroxy corresponding base
  modified_base (18)..(18): 2'-hydroxy corresponding base
  modified_base (19)..(19): 2'-hydroxy corresponding base
  modified_base (20)..(20): deoxythymidine
  modified_base (21)..(21): 5'-thio thymidine
auaaacuccaggccuaugatt

SEQ ID NO: 455 - DNA, 21 bp, Artificial Sequence
  Description of Artificial Sequence: Synthetic oligonucleotide
  Description of Combined DNA/RNA Molecule: Synthetic oligonucleotide
  siRNAs to PCSK9
  modified_base (1)..(1): 2'-hydroxy corresponding base
  modified_base (2)..(2): 2'-hydroxy corresponding base
  modified_base (3)..(3): 2'-hydroxy corresponding base
  modified_base (4)..(4): 2'-hydroxy corresponding base
  modified_base (5)..(5): 2'-hydroxy corresponding base
  modified_base (6)..(6): 2'-hydroxy corresponding base
  modified_base (7)..(7): 2'-hydroxy corresponding base
  modified_base (8)..(8): 2'-hydroxy corresponding base
  modified_base (9)..(9): 2'-hydroxy corresponding base
  modified_base (10)..(10): 2'-hydroxy corresponding base
  modified_base (11)..(11): 2'-hydroxy corresponding base
  modified_base (12)..(12): 2'-hydroxy corresponding base
  modified_base (13)..(13): 2'-hydroxy corresponding base
  modified_base (14)..(14): 2'-hydroxy corresponding base
  modified_base (15)..(15): 2'-hydroxy corresponding base
  modified_base (16)..(16): 2'-hydroxy corresponding base
  modified_base (17)..(17): 2'-hydroxy corresponding base
  modified_base (18)..(18): 2'-hydroxy corresponding base
  modified_base (19)..(19): 2'-hydroxy corresponding base
  modified_base (20)..(20): deoxythymidine
  modified_base (21)..(21): 5'-thio thymidine
ggccuggaguuuauucggatt

SEQ ID NO: 456 - DNA, 21 bp, Artificial Sequence
  Description of Artificial Sequence: Synthetic oligonucleotide
  Description of Combined DNA/RNA Molecule: Synthetic oligonucleotide
  siRNAs to PCSK9
  modified_base (1)..(1): 2'-hydroxy corresponding base
  modified_base (2)..(2): 2'-hydroxy corresponding base
  modified_base (3)..(3): 2'-hydroxy corresponding base
  modified_base (4)..(4): 2'-hydroxy corresponding base
  modified_base (5)..(5): 2'-hydroxy corresponding base
  modified_base (6)..(6): 2'-hydroxy corresponding base
  modified_base (7)..(7): 2'-hydroxy corresponding base
  modified_base (8)..(8): 2'-hydroxy corresponding base
  modified_base (9)..(9): 2'-hydroxy corresponding base
  modified_base (10)..(10): 2'-hydroxy corresponding base
  modified_base (11)..(11): 2'-hydroxy corresponding base
  modified_base (12)..(12): 2'-hydroxy corresponding base
  modified_base (13)..(13): 2'-hydroxy corresponding base
  modified_base (14)..(14): 2'-hydroxy corresponding base
  modified_base (15)..(15): 2'-hydroxy corresponding base
  modified_base (16)..(16): 2'-hydroxy corresponding base
  modified_base (17)..(17): 2'-hydroxy corresponding base
  modified_base (18)..(18): 2'-hydroxy corresponding base
  modified_base (19)..(19): 2'-hydroxy corresponding base
  modified_base (20)..(20): deoxythymidine
  modified_base (21)..(21): 5'-thio thymidine
uccgaauaaacuccaggcctt

SEQ ID NO: 457 - DNA, 21 bp, Artificial Sequence
  Description of Artificial Sequence: Synthetic oligonucleotide
  Description of Combined DNA/RNA Molecule: Synthetic oligonucleotide
  siRNAs to PCSK9
  modified_base (1)..(1): 2'-hydroxy corresponding base
  modified_base (2)..(2): 2'-hydroxy corresponding base
  modified_base (3)..(3): 2'-hydroxy corresponding base
  modified_base (4)..(4): 2'-hydroxy corresponding base
  modified_base (5)..(5): 2'-hydroxy corresponding base
  modified_base (6)..(6): 2'-hydroxy corresponding base
  modified_base (7)..(7): 2'-hydroxy corresponding base
  modified_base (8)..(8): 2'-hydroxy corresponding base
  modified_base (9)..(9): 2'-hydroxy corresponding base
  modified_base (10)..(10): 2'-hydroxy corresponding base
  modified_base (11)..(11): 2'-hydroxy corresponding base
  modified_base (12)..(12): 2'-hydroxy corresponding base
  modified_base (13)..(13): 2'-hydroxy corresponding base
  modified_base (14)..(14): 2'-hydroxy corresponding base
  modified_base (15)..(15): 2'-hydroxy corresponding base
  modified_base (16)..(16): 2'-hydroxy corresponding base
  modified_base (17)..(17): 2'-hydroxy corresponding base
  modified_base (18)..(18): 2'-hydroxy corresponding base
  modified_base (19)..(19): 2'-hydroxy corresponding base
  modified_base (20)..(20): deoxythymidine
  modified_base (21)..(21): 5'-thio thymidine
gccuggaguuuauucggaatt

SEQ ID NO: 458 - DNA, 21 bp, Artificial Sequence
  Description of Artificial Sequence: Synthetic oligonucleotide
  Description of Combined DNA/RNA Molecule: Synthetic oligonucleotide
  siRNAs to PCSK9
  modified_base (1)..(1): 2'-hydroxy corresponding base
  modified_base (2)..(2): 2'-hydroxy corresponding base
  modified_base (3)..(3): 2'-hydroxy corresponding base
  modified_base (4)..(4): 2'-hydroxy corresponding base
  modified_base (5)..(5): 2'-hydroxy corresponding base
  modified_base (6)..(6): 2'-hydroxy corresponding base
  modified_base (7)..(7): 2'-hydroxy corresponding base
  modified_base (8)..(8): 2'-hydroxy corresponding base
  modified_base (9)..(9): 2'-hydroxy corresponding base
  modified_base (10)..(10): 2'-hydroxy corresponding base
  modified_base (11)..(11): 2'-hydroxy corresponding base
  modified_base (12)..(12): 2'-hydroxy corresponding base
  modified_base (13)..(13): 2'-hydroxy corresponding base
  modified_base (14)..(14): 2'-hydroxy corresponding base
  modified_base (15)..(15): 2'-hydroxy corresponding base
  modified_base (16)..(16): 2'-hydroxy corresponding base
  modified_base (17)..(17): 2'-hydroxy corresponding base
  modified_base (18)..(18): 2'-hydroxy corresponding base
  modified_base (19)..(19): 2'-hydroxy corresponding base
  modified_base (20)..(20): deoxythymidine
  modified_base (21)..(21): 5'-thio thymidine
uuccgaauaaacuccaggctt

SEQ ID NO: 459 - DNA, 21 bp, Artificial Sequence
  Description of Artificial Sequence: Synthetic oligonucleotide
  Description of Combined DNA/RNA Molecule: Synthetic oligonucleotide
  siRNAs to PCSK9
  modified_base (1)..(1): 2'-hydroxy corresponding base
  modified_base (2)..(2): 2'-O-methyl corresponding base
  modified_base (3)..(3): 2'-O-methyl corresponding base
  modified_base (4)..(4): 2'-O-methyl corresponding base
  modified_base (5)..(5): 2'-hydroxy corresponding base
  modified_base (6)..(6): 2'-hydroxy corresponding base
  modified_base (7)..(7): 2'-hydroxy corresponding base
  modified_base (8)..(8): 2'-hydroxy corresponding base
  modified_base (9)..(9): 2'-O-methyl corresponding base
  modified_base (10)..(10): 2'-O-methyl corresponding base
  modified_base (11)..(11): 2'-O-methyl corresponding base
  modified_base (12)..(12): 2'-hydroxy corresponding base
  modified_base (13)..(13): 2'-O-methyl corresponding base
  modified_base (14)..(14): 2'-O-methyl corresponding base
  modified_base (15)..(15): 2'-O-methyl corresponding base
  modified_base (16)..(16): 2'-hydroxy corresponding base
  modified_base (17)..(17): 2'-hydroxy corresponding base
  modified_base (18)..(18): 2'-hydroxy corresponding base
  modified_base (19)..(19): 2'-hydroxy corresponding base
  modified_base (20)..(20): deoxythymidine
  modified_base (21)..(21): 5'-thio thymidine
gccuggaguuuauucggaatt

SEQ ID NO: 460 - DNA, 21 bp, Artificial Sequence
  Description of Artificial Sequence: Synthetic oligonucleotide
  Description of Combined DNA/RNA Molecule: Synthetic oligonucleotide
  siRNAs to PCSK9
  modified_base (1)..(1): 2'-hydroxy corresponding base
  modified_base (2)..(2): 2'-hydroxy corresponding base
  modified_base (3)..(3): 2'-hydroxy corresponding base
  modified_base (4)..(4): 2'-hydroxy corresponding base
  modified_base (5)..(5): 2'-hydroxy corresponding base
  modified_base (6)..(6): 2'-hydroxy corresponding base
  modified_base (7)..(7): 2'-hydroxy corresponding base
  modified_base (8)..(8): 2'-O-methyl corresponding base
  modified_base (9)..(9): 2'-hydroxy corresponding base
  modified_base (10)..(10): 2'-hydroxy corresponding base
  modified_base (11)..(11): 2'-hydroxy corresponding base
  modified_base (12)..(12): 2'-hydroxy corresponding base
  modified_base (13)..(13): 2'-hydroxy corresponding base
  modified_base (14)..(14): 2'-hydroxy corresponding base
  modified_base (15)..(15): 2'-O-methyl corresponding base
  modified_base (16)..(16): 2'-hydroxy corresponding base
  modified_base (17)..(17): 2'-hydroxy corresponding base
  modified_base (18)..(18): 2'-hydroxy corresponding base
  modified_base (19)..(19): 2'-hydroxy corresponding base
  modified_base (20)..(20): deoxythymidine
  modified_base (21)..(21): 5'-thio thymidine
uuccgaauaaacuccaggctt

SEQ ID NO: 461 - DNA, 21 bp, Artificial Sequence
  Description of Artificial Sequence: Synthetic oligonucleotide
  Description of Combined DNA/RNA Molecule: Synthetic oligonucleotide
  siRNAs to PCSK9
  modified_base (1)..(1): 2'-hydroxy corresponding base
  modified_base (2)..(2): 2'-O-methyl corresponding base
  modified_base (3)..(3): 2'-O-methyl corresponding base
  modified_base (4)..(4): 2'-O-methyl corresponding base
  modified_base (5)..(5): 2'-hydroxy corresponding base
  modified_base (6)..(6): 2'-hydroxy corresponding base
  modified_base (7)..(7): 2'-hydroxy corresponding base
  modified_base (8)..(8): 2'-hydroxy corresponding base
  modified_base (9)..(9): 2'-O-methyl corresponding base
  modified_base (10)..(10): 2'-O-methyl corresponding base
  modified_base (11)..(11): 2'-O-methyl corresponding base
  modified_base (12)..(12): 2'-hydroxy corresponding base
  modified_base (13)..(13): 2'-O-methyl corresponding base
  modified_base (14)..(14): 2'-O-methyl corresponding base
  modified_base (15)..(15): 2'-O-methyl corresponding base
  modified_base (16)..(16): 2'-hydroxy corresponding base
  modified_base (17)..(17): 2'-hydroxy corresponding base
  modified_base (18)..(18): 2'-hydroxy corresponding base
  modified_base (19)..(19): 2'-hydroxy corresponding base
  modified_base (20)..(20): deoxythymidine
  modified_base (21)..(21): 5'-thio thymidine
gccuggaguuuauucggaatt

SEQ ID NO: 462 - DNA, 20 bp, Artificial Sequence
  Description of Artificial Sequence: Synthetic oligonucleotide
  Description of Combined DNA/RNA Molecule: Synthetic oligonucleotide
  siRNAs to PCSK9
  modified_base (1)..(1): 2'-hydroxy corresponding base
  modified_base (2)..(2): 2'-hydroxy corresponding base
  modified_base (3)..(3): 2'-hydroxy corresponding base
  modified_base (4)..(4): 2'-hydroxy corresponding base
  modified_base (5)..(5): 2'-hydroxy corresponding base
  modified_base (6)..(6): 2'-hydroxy corresponding base
  modified_base (7)..(7): 2'-hydroxy corresponding base
  modified_base (8)..(8): 2'-hydroxy corresponding base
  modified_base (9)..(9): 2'-hydroxy corresponding base
  modified_base (10)..(10): 2'-hydroxy corresponding base
  modified_base (11)..(11): 2'-hydroxy corresponding base
  modified_base (12)..(12): 2'-hydroxy corresponding base
  modified_base (13)..(13): 2'-hydroxy corresponding base
  modified_base (14)..(14): 2'-hydroxy corresponding base
  modified_base (15)..(15): 2'-hydroxy corresponding base
  modified_base (16)..(16): 2'-hydroxy corresponding base
  modified_base (17)..(17): 2'-hydroxy corresponding base
  modified_base (18)..(18): 2'-hydroxy corresponding base
  modified_base (19)..(19): deoxythymidine
  modified_base (20)..(20): 5'-thio thymidine
uuccgaauaacuccaggctt

SEQ ID NO: 463 - DNA, 21 bp, Artificial Sequence
  Description of Artificial Sequence: Synthetic oligonucleotide
  Description of Combined DNA/RNA Molecule: Synthetic oligonucleotide
  siRNAs to PCSK9
  modified_base (1)..(1): 2'-hydroxy corresponding base
  modified_base (2)..(2): 2'-hydroxy corresponding base
  modified_base (3)..(3): 2'-hydroxy corresponding base
  modified_base (4)..(4): 2'-hydroxy corresponding base
  modified_base (5)..(5): 2'-hydroxy corresponding base
  modified_base (6)..(6): 2'-hydroxy corresponding base
  modified_base (7)..(7): 2'-hydroxy corresponding base
  modified_base (8)..(8): 2'-hydroxy corresponding base
  modified_base (9)..(9): 2'-hydroxy corresponding base
  modified_base (10)..(10): 2'-hydroxy corresponding base
  modified_base (11)..(11): 2'-hydroxy corresponding base
  modified_base (12)..(12): 2'-hydroxy corresponding base
  modified_base (13)..(13): 2'-hydroxy corresponding base
  modified_base (14)..(14): 2'-hydroxy corresponding base
  modified_base (15)..(15): 2'-hydroxy corresponding base
  modified_base (16)..(16): 2'-hydroxy corresponding base
  modified_base (17)..(17): 2'-hydroxy corresponding base
  modified_base (18)..(18): 2'-hydroxy corresponding base
  modified_base (19)..(19): 2'-hydroxy corresponding base
  modified_base (20)..(20): deoxythymidine
  modified_base (21)..(21): 5'-thio thymidine
cuggaguuuauucggaaaatt

SEQ ID NO: 464 - DNA, 21 bp, Artificial Sequence
  Description of Artificial Sequence: Synthetic oligonucleotide
  Description of Combined DNA/RNA Molecule: Synthetic oligonucleotide
  siRNAs to PCSK9
  modified_base (1)..(1): 2'-hydroxy corresponding base
  modified_base (2)..(2): 2'-hydroxy corresponding base
  modified_base (3)..(3): 2'-hydroxy corresponding base
  modified_base (4)..(4): 2'-hydroxy corresponding base
  modified_base (5)..(5): 2'-hydroxy corresponding base
  modified_base (6)..(6): 2'-hydroxy corresponding base
  modified_base (7)..(7): 2'-hydroxy corresponding base
  modified_base (8)..(8): 2'-hydroxy corresponding base
  modified_base (9)..(9): 2'-hydroxy corresponding base
  modified_base (10)..(10): 2'-hydroxy corresponding base
  modified_base (11)..(11): 2'-hydroxy corresponding base
  modified_base (12)..(12): 2'-hydroxy corresponding base
  modified_base (13)..(13): 2'-hydroxy corresponding base
  modified_base (14)..(14): 2'-hydroxy corresponding base
  modified_base (15)..(15): 2'-hydroxy corresponding base
  modified_base (16)..(16): 2'-hydroxy corresponding base
  modified_base (17)..(17): 2'-hydroxy corresponding base
  modified_base (18)..(18): 2'-hydroxy corresponding base
  modified_base (19)..(19): 2'-hydroxy corresponding base
  modified_base (20)..(20): deoxythymidine
  modified_base (21)..(21): 5'-thio thymidine
uuuuccgaauaaacuccagtt

SEQ ID NO: 465 - DNA, 21 bp, Artificial Sequence
  Description of Artificial Sequence: Synthetic oligonucleotide
  Description of Combined DNA/RNA Molecule: Synthetic oligonucleotide
  siRNAs to PCSK9
  modified_base (1)..(1): 2'-O-methyl corresponding base
  modified_base (2)..(2): 2'-O-methyl corresponding base
  modified_base (3)..(3): 2'-hydroxy corresponding base
  modified_base (4)..(4): 2'-hydroxy corresponding base
  modified_base (5)..(5): 2'-hydroxy corresponding base
  modified_base (6)..(6): 2'-hydroxy corresponding base
  modified_base (7)..(7): 2'-O-methyl corresponding base
  modified_base (8)..(8): 2'-O-methyl corresponding base
  modified_base (9)..(9): 2'-O-methyl corresponding base
  modified_base (10)..(10): 2'-hydroxy corresponding base
  modified_base (11)..(11): 2'-O-methyl corresponding base
  modified_base (12)..(12): 2'-O-methyl corresponding base
  modified_base (13)..(13): 2'-O-methyl corresponding base
  modified_base (14)..(14): 2'-hydroxy corresponding base
  modified_base (15)..(15): 2'-hydroxy corresponding base
  modified_base (16)..(16): 2'-hydroxy corresponding base
  modified_base (17)..(17): 2'-hydroxy corresponding base
  modified_base (18)..(18): 2'-hydroxy corresponding base
  modified_base (19)..(19): 2'-hydroxy corresponding base
  modified_base (20)..(20): deoxythymidine
  modified_base (21)..(21): 5'-thio thymidine
cuggaguuuauucggaaaatt

SEQ ID NO: 466 - DNA, 21 bp, Artificial Sequence
  Description of Artificial Sequence: Synthetic oligonucleotide
  Description of Combined DNA/RNA Molecule: Synthetic oligonucleotide
  siRNAs to PCSK9
  modified_base (1)..(1): 2'-hydroxy corresponding base
  modified_base (2)..(2): 2'-hydroxy corresponding base
  modified_base (3)..(3): 2'-hydroxy corresponding base
  modified_base (4)..(4): 2'-hydroxy corresponding base
  modified_base (5)..(5): 2'-hydroxy corresponding base
  modified_base (6)..(6): 2'-hydroxy corresponding base
  modified_base (7)..(7): 2'-hydroxy corresponding base
  modified_base (8)..(8): 2'-hydroxy corresponding base
  modified_base (9)..(9): 2'-hydroxy corresponding base
  modified_base (10)..(10): 2'-O-methyl corresponding base
  modified_base (11)..(11): 2'-hydroxy corresponding base
  modified_base (12)..(12): 2'-hydroxy corresponding base
  modified_base (13)..(13): 2'-hydroxy corresponding base
  modified_base (14)..(14): 2'-hydroxy corresponding base
  modified_base (15)..(15): 2'-hydroxy corresponding base
  modified_base (16)..(16): 2'-hydroxy corresponding base
  modified_base (17)..(17): 2'-O-methyl corresponding base
  modified_base (18)..(18): 2'-hydroxy corresponding base
  modified_base (19)..(19): 2'-hydroxy corresponding base
  modified_base (20)..(20): deoxythymidine
  modified_base (21)..(21): 5'-thio thymidine
uuuuccgaauaaacuccagtt

SEQ ID NO: 467 - DNA, 21 bp, Artificial Sequence
  Description of Artificial Sequence: Synthetic oligonucleotide
  Description of Combined DNA/RNA Molecule: Synthetic oligonucleotide
  siRNAs to PCSK9
  modified_base (1)..(1): 2'-hydroxy corresponding base
  modified_base (2)..(2): 2'-hydroxy corresponding base
  modified_base (3)..(3): 2'-hydroxy corresponding base
  modified_base (4)..(4): 2'-hydroxy corresponding base
  modified_base (5)..(5): 2'-hydroxy corresponding base
  modified_base (6)..(6): 2'-hydroxy corresponding base
  modified_base (7)..(7): 2'-hydroxy corresponding base
  modified_base (8)..(8): 2'-hydroxy corresponding base
  modified_base (9)..(9): 2'-hydroxy corresponding base
  modified_base (10)..(10): 2'-hydroxy corresponding base
  modified_base (11)..(11): 2'-hydroxy corresponding base
  modified_base (12)..(12): 2'-hydroxy corresponding base
  modified_base (13)..(13): 2'-hydroxy corresponding base
  modified_base (14)..(14): 2'-hydroxy corresponding base
  modified_base (15)..(15): 2'-hydroxy corresponding base
  modified_base (16)..(16): 2'-hydroxy corresponding base
  modified_base (17)..(17): 2'-hydroxy corresponding base
  modified_base (18)..(18): 2'-hydroxy corresponding base
  modified_base (19)..(19): 2'-hydroxy corresponding base
  modified_base (20)..(20): deoxythymidine
  modified_base (21)..(21): 5'-thio thymidine
ggaguuuauucggaaaagctt

SEQ ID NO: 468 - DNA, 21 bp, Artificial Sequence
  Description of Artificial Sequence: Synthetic oligonucleotide
  Description of Combined DNA/RNA Molecule: Synthetic oligonucleotide
  siRNAs to PCSK9
  modified_base (1)..(1): 2'-hydroxy corresponding base
  modified_base (2)..(2): 2'-hydroxy corresponding base
  modified_base (3)..(3): 2'-hydroxy corresponding base
  modified_base (4)..(4): 2'-hydroxy corresponding base
  modified_base (5)..(5): 2'-hydroxy corresponding base
  modified_base (6)..(6): 2'-hydroxy corresponding base
  modified_base (7)..(7): 2'-hydroxy corresponding base
  modified_base (8)..(8): 2'-hydroxy corresponding base
  modified_base (9)..(9): 2'-hydroxy corresponding base
  modified_base (10)..(10): 2'-hydroxy corresponding base
  modified_base (11)..(11): 2'-hydroxy corresponding base
  modified_base (12)..(12): 2'-hydroxy corresponding base
  modified_base (13)..(13): 2'-hydroxy corresponding base
  modified_base (14)..(14): 2'-hydroxy corresponding base
  modified_base (15)..(15): 2'-hydroxy corresponding base
  modified_base (16)..(16): 2'-hydroxy corresponding base
  modified_base (17)..(17): 2'-hydroxy corresponding base
  modified_base (18)..(18): 2'-hydroxy corresponding base
  modified_base (19)..(19): 2'-hydroxy corresponding base
  modified_base (20)..(20): deoxythymidine
  modified_base (21)..(21): 5'-thio thymidine
gcuuuuccgaauaaacucctt

SEQ ID NO: 469 - DNA, 21 bp, Artificial Sequence
  Description of Artificial Sequence: Synthetic oligonucleotide
  Description of Combined DNA/RNA Molecule: Synthetic oligonucleotide
  siRNAs to PCSK9
  modified_base (1)..(1): 2'-hydroxy corresponding base
  modified_base (2)..(2): 2'-hydroxy corresponding base
  modified_base (3)..(3): 2'-hydroxy corresponding base
  modified_base (4)..(4): 2'-hydroxy corresponding base
  modified_base (5)..(5): 2'-O-methyl corresponding base
  modified_base (6)..(6): 2'-O-methyl corresponding base
  modified_base (7)..(7): 2'-O-methyl corresponding base
  modified_base (8)..(8): 2'-hydroxy corresponding base
  modified_base (9)..(9): 2'-O-methyl corresponding base
  modified_base (10)..(10): 2'-O-methyl corresponding base
  modified_base (11)..(11): 2'-O-methyl corresponding base
  modified_base (12)..(12): 2'-hydroxy corresponding base
  modified_base (13)..(13): 2'-hydroxy corresponding base
  modified_base (14)..(14): 2'-hydroxy corresponding base
  modified_base (15)..(15): 2'-hydroxy corresponding base
  modified_base (16)..(16): 2'-hydroxy corresponding base
  modified_base (17)..(17): 2'-hydroxy corresponding base
  modified_base (18)..(18): 2'-hydroxy corresponding base
  modified_base (19)..(19): 2'-O-methyl corresponding base
  modified_base (20)..(20): deoxythymidine
  modified_base (21)..(21): 5'-thio thymidine
ggaguuuauucggaaaagctt

SEQ ID NO: 470 - DNA, 21 bp, Artificial Sequence
  Description of Artificial Sequence: Synthetic oligonucleotide
  Description of Combined DNA/RNA Molecule: Synthetic oligonucleotide
  siRNAs to PCSK9
  modified_base (1)..(1): 2'-hydroxy corresponding base
  modified_base (2)..(2): 2'-hydroxy corresponding base
  modified_base (3)..(3): 2'-hydroxy corresponding base
  modified_base (4)..(4): 2'-hydroxy corresponding base
  modified_base (5)..(5): 2'-hydroxy corresponding base
  modified_base (6)..(6): 2'-hydroxy corresponding base
  modified_base (7)..(7): 2'-hydroxy corresponding base
  modified_base (8)..(8): 2'-hydroxy corresponding base
  modified_base (9)..(9): 2'-hydroxy corresponding base
  modified_base (10)..(10): 2'-hydroxy corresponding base
  modified_base (11)..(11): 2'-hydroxy corresponding base
  modified_base (12)..(12): 2'-O-methyl corresponding base
  modified_base (13)..(13): 2'-hydroxy corresponding base
  modified_base (14)..(14): 2'-hydroxy corresponding base
  modified_base (15)..(15): 2'-hydroxy corresponding base
  modified_base (16)..(16): 2'-hydroxy corresponding base
  modified_base (17)..(17): 2'-hydroxy corresponding base
  modified_base (18)..(18): 2'-hydroxy corresponding base
  modified_base (19)..(19): 2'-hydroxy corresponding base
  modified_base (20)..(20): deoxythymidine
  modified_base (21)..(21): 5'-thio thymidine
gcuuuuccgaauaaacucctt

SEQ ID NO: 471 - DNA, 21 bp, Artificial Sequence
  Description of Artificial Sequence: Synthetic oligonucleotide
  Description of Combined DNA/RNA Molecule: Synthetic oligonucleotide
  siRNAs to PCSK9
  modified_base (1)..(1): 2'-hydroxy corresponding base
  modified_base (2)..(2): 2'-hydroxy corresponding base
  modified_base (3)..(3): 2'-hydroxy corresponding base
  modified_base (4)..(4): 2'-hydroxy corresponding base
  modified_base (5)..(5): 2'-hydroxy corresponding base
  modified_base (6)..(6): 2'-hydroxy corresponding base
  modified_base (7)..(7): 2'-hydroxy corresponding base
  modified_base (8)..(8): 2'-hydroxy corresponding base
  modified_base (9)..(9): 2'-hydroxy corresponding base
  modified_base (10)..(10): 2'-hydroxy corresponding base
  modified_base (11)..(11): 2'-hydroxy corresponding base
  modified_base (12)..(12): 2'-hydroxy corresponding base
  modified_base (13)..(13): 2'-hydroxy corresponding base
  modified_base (14)..(14): 2'-hydroxy corresponding base
  modified_base (15)..(15): 2'-hydroxy corresponding base
  modified_base (16)..(16): 2'-hydroxy corresponding base
  modified_base (17)..(17): 2'-hydroxy corresponding base
  modified_base (18)..(18): 2'-hydroxy corresponding base
  modified_base (19)..(19): 2'-hydroxy corresponding base
  modified_base (20)..(20): deoxythymidine
  modified_base (21)..(21): 5'-thio thymidine
gaguuuauucggaaaagcctt

SEQ ID NO: 472 - DNA, 21 bp, Artificial Sequence
  Description of Artificial Sequence: Synthetic oligonucleotide
  Description of Combined DNA/RNA Molecule: Synthetic oligonucleotide
  siRNAs to PCSK9
  modified_base (1)..(1): 2'-hydroxy corresponding base
  modified_base (2)..(2): 2'-hydroxy corresponding base
  modified_base (3)..(3): 2'-hydroxy corresponding base
  modified_base (4)..(4): 2'-hydroxy corresponding base
  modified_base (5)..(5): 2'-hydroxy corresponding base
  modified_base (6)..(6): 2'-hydroxy corresponding base
  modified_base (7)..(7): 2'-hydroxy corresponding base
  modified_base (8)..(8): 2'-hydroxy corresponding base
  modified_base (9)..(9): 2'-hydroxy corresponding base
  modified_base (10)..(10): 2'-hydroxy corresponding base
  modified_base (11)..(11): 2'-hydroxy corresponding base
  modified_base (12)..(12): 2'-hydroxy corresponding base
  modified_base (13)..(13): 2'-hydroxy corresponding base
  modified_base (14)..(14): 2'-hydroxy corresponding base
  modified_base (15)..(15): 2'-hydroxy corresponding base
  modified_base (16)..(16): 2'-hydroxy corresponding base
  modified_base (17)..(17): 2'-hydroxy corresponding base
  modified_base (18)..(18): 2'-hydroxy corresponding base
  modified_base (19)..(19): 2'-hydroxy corresponding base
  modified_base (20)..(20): deoxythymidine
  modified_base (21)..(21): 5'-thio thymidine
ggcuuuuccgaauaaacuctt

SEQ ID NO: 473 - DNA, 21 bp, Artificial Sequence
  Description of Artificial Sequence: Synthetic oligonucleotide
  Description of Combined DNA/RNA Molecule: Synthetic oligonucleotide
  siRNAs to PCSK9
  modified_base (1)..(1): 2'-hydroxy corresponding base
  modified_base (2)..(2): 2'-hydroxy corresponding base
  modified_base (3)..(3): 2'-hydroxy corresponding base
  modified_base (4)..(4): 2'-O-methyl corresponding base
  modified_base (5)..(5): 2'-O-methyl corresponding base
  modified_base (6)..(6): 2'-O-methyl corresponding base
  modified_base (7)..(7): 2'-hydroxy corresponding base
  modified_base (8)..(8): 2'-O-methyl corresponding base
  modified_base (9)..(9): 2'-O-methyl corresponding base
  modified_base (10)..(10): 2'-O-methyl corresponding base
  modified_base (11)..(11): 2'-hydroxy corresponding base
  modified_base (12)..(12): 2'-hydroxy corresponding base
  modified_base (13)..(13): 2'-hydroxy corresponding base
  modified_base (14)..(14): 2'-hydroxy corresponding base
  modified_base (15)..(15): 2'-hydroxy corresponding base
  modified_base (16)..(16): 2'-hydroxy corresponding base
  modified_base (17)..(17): 2'-hydroxy corresponding base
  modified_base (18)..(18): 2'-O-methyl corresponding base
  modified_base (19)..(19): 2'-O-methyl corresponding base
  modified_base (20)..(20): deoxythymidine
  modified_base (21)..(21): 5'-thio thymidine
gaguuuauucggaaaagcctt

SEQ ID NO: 474 - DNA, 21 bp, Artificial Sequence
  Description of Artificial Sequence: Synthetic oligonucleotide
  Description of Combined DNA/RNA Molecule: Synthetic oligonucleotide
  siRNAs to PCSK9
  modified_base (1)..(1): 2'-hydroxy corresponding base
  modified_base (2)..(2): 2'-hydroxy corresponding base
  modified_base (3)..(3): 2'-hydroxy corresponding base
  modified_base (4)..(4): 2'-hydroxy corresponding base
  modified_base (5)..(5): 2'-hydroxy corresponding base
  modified_base (6)..(6): 2'-hydroxy corresponding base
  modified_base (7)..(7): 2'-hydroxy corresponding base
  modified_base (8)..(8): 2'-hydroxy corresponding base
  modified_base (9)..(9): 2'-hydroxy corresponding base
  modified_base (10)..(10): 2'-hydroxy corresponding base
  modified_base (11)..(11): 2'-hydroxy corresponding base
  modified_base (12)..(12): 2'-hydroxy corresponding base
  modified_base (13)..(13): 2'-O-methyl corresponding base
  modified_base (14)..(14): 2'-hydroxy corresponding base
  modified_base (15)..(15): 2'-hydroxy corresponding base
  modified_base (16)..(16): 2'-hydroxy corresponding base
  modified_base (17)..(17): 2'-hydroxy corresponding base
  modified_base (18)..(18): 2'-hydroxy corresponding base
  modified_base (19)..(19): 2'-hydroxy corresponding base
  modified_base (20)..(20): deoxythymidine
  modified_base (21)..(21): 5'-thio thymidine
ggcuuuuccgaauaaacuctt

SEQ ID NO: 475 - DNA, 21 bp, Artificial Sequence
  Description of Artificial Sequence: Synthetic oligonucleotide
  Description of Combined DNA/RNA Molecule: Synthetic oligonucleotide
  siRNAs to PCSK9
  modified_base (1)..(1): 2'-hydroxy corresponding base
  modified_base (2)..(2): 2'-hydroxy corresponding base
  modified_base (3)..(3): 2'-hydroxy corresponding base
  modified_base (4)..(4): 2'-hydroxy corresponding base
  modified_base (5)..(5): 2'-hydroxy corresponding base
  modified_base (6)..(6): 2'-hydroxy corresponding base
  modified_base (7)..(7): 2'-hydroxy corresponding base
  modified_base (8)..(8): 2'-hydroxy corresponding base
  modified_base (9)..(9): 2'-hydroxy corresponding base
  modified_base (10)..(10): 2'-hydroxy corresponding base
  modified_base (11)..(11): 2'-hydroxy corresponding base
  modified_base (12)..(12): 2'-hydroxy corresponding base
  modified_base (13)..(13): 2'-hydroxy corresponding base
  modified_base (14)..(14): 2'-hydroxy corresponding base
  modified_base (15)..(15): 2'-hydroxy corresponding base
  modified_base (16)..(16): 2'-hydroxy corresponding base
  modified_base (17)..(17): 2'-hydroxy corresponding base
  modified_base (18)..(18): 2'-hydroxy corresponding base
  modified_base (19)..(19): 2'-hydroxy corresponding base
  modified_base (20)..(20): deoxythymidine
  modified_base (21)..(21): 5'-thio thymidine
uuauucggaaaagccagcutt

SEQ ID NO: 476 - DNA, 21 bp, Artificial Sequence
  Description of Artificial Sequence: Synthetic oligonucleotide
  Description of Combined DNA/RNA Molecule: Synthetic oligonucleotide
  siRNAs to PCSK9
  modified_base (1)..(1): 2'-hydroxy corresponding base
  modified_base (2)..(2): 2'-hydroxy corresponding base
  modified_base (3)..(3): 2'-hydroxy corresponding base
  modified_base (4)..(4): 2'-hydroxy corresponding base
  modified_base (5)..(5): 2'-hydroxy corresponding base
  modified_base (6)..(6): 2'-hydroxy corresponding base
  modified_base (7)..(7): 2'-hydroxy corresponding base
  modified_base (8)..(8): 2'-hydroxy corresponding base
  modified_base (9)..(9): 2'-hydroxy corresponding base
  modified_base (10)..(10): 2'-hydroxy corresponding base
  modified_base (11)..(11): 2'-hydroxy corresponding base
  modified_base (12)..(12): 2'-hydroxy corresponding base
  modified_base (13)..(13): 2'-hydroxy corresponding base
  modified_base (14)..(14): 2'-hydroxy corresponding base
  modified_base (15)..(15): 2'-hydroxy corresponding base
  modified_base (16)..(16): 2'-hydroxy corresponding base
  modified_base (17)..(17): 2'-hydroxy corresponding base
  modified_base (18)..(18): 2'-hydroxy corresponding base
  modified_base (19)..(19): 2'-hydroxy corresponding base
  modified_base (20)..(20): deoxythymidine
  modified_base (21)..(21): 5'-thio thymidine
agcuggcuuuuccgaauaatt

SEQ ID NO: 477 - DNA, 21 bp, Artificial Sequence
  Description of Artificial Sequence: Synthetic oligonucleotide
  Description of Combined DNA/RNA Molecule: Synthetic oligonucleotide
  siRNAs to PCSK9
  modified_base (1)..(1): 2'-O-methyl corresponding base
  modified_base (2)..(2): 2'-O-methyl corresponding base
  modified_base (3)..(3): 2'-hydroxy corresponding base
  modified_base (4)..(4): 2'-O-methyl corresponding base
  modified_base (5)..(5): 2'-O-methyl corresponding base
  modified_base (6)..(6): 2'-O-methyl corresponding base
  modified_base (7)..(7): 2'-hydroxy corresponding base
  modified_base (8)..(8): 2'-hydroxy corresponding base
  modified_base (9)..(9): 2'-hydroxy corresponding base
  modified_base (10)..(10): 2'-hydroxy corresponding base
  modified_base (11)..(11): 2'-hydroxy corresponding base
  modified_base (12)..(12): 2'-hydroxy corresponding base
  modified_base (13)..(13): 2'-hydroxy corresponding base
  modified_base (14)..(14): 2'-O-methyl corresponding base
  modified_base (15)..(15): 2'-O-methyl corresponding base
  modified_base (16)..(16): 2'-hydroxy corresponding base
  modified_base (17)..(17): 2'-hydroxy corresponding base
  modified_base (18)..(18): 2'-O-methyl corresponding base
  modified_base (19)..(19): 2'-O-methyl corresponding base
  modified_base (20)..(20): deoxythymidine
  modified_base (21)..(21): 5'-thio thymidine
uuauucggaaaagccagcutt

SEQ ID NO: 478 - DNA, 21 bp, Artificial Sequence
  Description of Artificial Sequence: Synthetic oligonucleotide
  Description of Combined DNA/RNA Molecule: Synthetic oligonucleotide
  siRNAs to PCSK9
  modified_base (1)..(1): 2'-hydroxy corresponding base
  modified_base (2)..(2): 2'-hydroxy corresponding base
  modified_base (3)..(3): 2'-hydroxy corresponding base
  modified_base (4)..(4): 2'-hydroxy corresponding base
  modified_base (5)..(5): 2'-hydroxy corresponding base
  modified_base (6)..(6): 2'-hydroxy corresponding base
  modified_base (7)..(7): 2'-hydroxy corresponding base
  modified_base (8)..(8): 2'-hydroxy corresponding base
  modified_base (9)..(9): 2'-hydroxy corresponding base
  modified_base (10)..(10): 2'-hydroxy corresponding base
  modified_base (11)..(11): 2'-hydroxy corresponding base
  modified_base (12)..(12): 2'-hydroxy corresponding base
  modified_base (13)..(13): 2'-hydroxy corresponding base
  modified_base (14)..(14): 2'-hydroxy corresponding base
  modified_base (15)..(15): 2'-hydroxy corresponding base
  modified_base (16)..(16): 2'-hydroxy corresponding base
  modified_base (17)..(17): 2'-O-methyl corresponding base
  modified_base (18)..(18): 2'-hydroxy corresponding base
  modified_base (19)..(19): 2'-hydroxy corresponding base
  modified_base (20)..(20): deoxythymidine
  modified_base (21)..(21): 5'-thio thymidine
agcuggcuuuuccgaauaatt

SEQ ID NO: 479 - DNA, 21 bp, Artificial Sequence
  Description of Artificial Sequence: Synthetic oligonucleotide
  Description of Combined DNA/RNA Molecule: Synthetic oligonucleotide
  siRNAs to PCSK9
  modified_base (1)..(1): 2'-hydroxy corresponding base
  modified_base (2)..(2): 2'-hydroxy corresponding base
  modified_base (3)..(3): 2'-hydroxy corresponding base
  modified_base (4)..(4): 2'-hydroxy corresponding base
  modified_base (5)..(5): 2'-hydroxy corresponding base
  modified_base (6)..(6): 2'-hydroxy corresponding base
  modified_base (7)..(7): 2'-hydroxy corresponding base
  modified_base (8)..(8): 2'-hydroxy corresponding base
  modified_base (9)..(9): 2'-hydroxy corresponding base
  modified_base (10)..(10): 2'-hydroxy corresponding base
  modified_base (11)..(11): 2'-hydroxy corresponding base
  modified_base (12)..(12): 2'-hydroxy corresponding base
  modified_base (13)..(13): 2'-hydroxy corresponding base
  modified_base (14)..(14): 2'-hydroxy corresponding base
  modified_base (15)..(15): 2'-hydroxy corresponding base
  modified_base (16)..(16): 2'-hydroxy corresponding base
  modified_base (17)..(17): 2'-hydroxy corresponding base
  modified_base (18)..(18): 2'-hydroxy corresponding base
  modified_base (19)..(19): 2'-hydroxy corresponding base
  modified_base (20)..(20): deoxythymidine
  modified_base (21)..(21): 5'-thio thymidine
cccuggcggguggguacagtt

SEQ ID NO: 480 - DNA, 21 bp, Artificial Sequence
  Description of Artificial Sequence: Synthetic oligonucleotide
  Description of Combined DNA/RNA Molecule: Synthetic oligonucleotide
  siRNAs to PCSK9
  modified_base (1)..(1): 2'-hydroxy corresponding base
  modified_base (2)..(2): 2'-hydroxy corresponding base
  modified_base (3)..(3): 2'-hydroxy corresponding base
  modified_base (4)..(4): 2'-hydroxy corresponding base
  modified_base (5)..(5): 2'-hydroxy corresponding base
  modified_base (6)..(6): 2'-hydroxy corresponding base
  modified_base (7)..(7): 2'-hydroxy corresponding base
  modified_base (8)..(8): 2'-hydroxy corresponding base
  modified_base (9)..(9): 2'-hydroxy corresponding base
  modified_base (10)..(10): 2'-hydroxy corresponding base
  modified_base (11)..(11): 2'-hydroxy corresponding base
  modified_base (12)..(12): 2'-hydroxy corresponding base
  modified_base (13)..(13): 2'-hydroxy corresponding base
  modified_base (14)..(14): 2'-hydroxy corresponding base
  modified_base (15)..(15): 2'-hydroxy corresponding base
  modified_base (16)..(16): 2'-hydroxy corresponding base
  modified_base (17)..(17): 2'-hydroxy corresponding base
  modified_base (18)..(18): 2'-hydroxy corresponding base
  modified_base (19)..(19): 2'-hydroxy corresponding base
  modified_base (20)..(20): deoxythymidine
  modified_base (21)..(21): 5'-thio thymidine
cuguacccacccgccagggtt

SEQ ID NO: 481 - DNA, 21 bp, Artificial Sequence
  Description of Artificial Sequence: Synthetic oligonucleotide
  Description of Combined DNA/RNA Molecule: Synthetic oligonucleotide
  siRNAs to PCSK9
  modified_base (1)..(1): 2'-O-methyl corresponding base
  modified_base (2)..(2): 2'-O-methyl corresponding base
  modified_base (3)..(3): 2'-O-methyl corresponding base
  modified_base (4)..(4): 2'-O-methyl corresponding base
  modified_base (5)..(5): 2'-hydroxy corresponding base
  modified_base (6)..(6): 2'-hydroxy corresponding base
  modified_base (7)..(7): 2'-O-methyl corresponding base
  modified_base (8)..(8): 2'-hydroxy corresponding base
  modified_base (9)..(9): 2'-hydroxy corresponding base
  modified_base (10)..(10): 2'-hydroxy corresponding base
  modified_base (11)..(11): 2'-O-methyl corresponding base
  modified_base (12)..(12): 2'-hydroxy corresponding base
  modified_base (13)..(13): 2'-hydroxy corresponding base
  modified_base (14)..(14): 2'-hydroxy corresponding base
  modified_base (15)..(15): 2'-O-methyl corresponding base
  modified_base (16)..(16): 2'-hydroxy corresponding base
  modified_base (17)..(17): 2'-O-methyl corresponding base
  modified_base (18)..(18): 2'-hydroxy corresponding base
  modified_base (19)..(19): 2'-hydroxy corresponding base
  modified_base (20)..(20): deoxythymidine
  modified_base (21)..(21): 5'-thio thymidine
cccuggcggguggguacagtt

SEQ ID NO: 482 - DNA, 21 bp, Artificial Sequence
  Description of Artificial Sequence: Synthetic oligonucleotide
  Description of Combined DNA/RNA Molecule: Synthetic oligonucleotide
  siRNAs to PCSK9
  modified_base (1)..(1): 2'-hydroxy corresponding base
  modified_base (2)..(2): 2'-hydroxy corresponding base
  modified_base (3)..(3): 2'-hydroxy corresponding base
  modified_base (4)..(4): 2'-O-methyl corresponding base
  modified_base (5)..(5): 2'-hydroxy corresponding base
  modified_base (6)..(6): 2'-hydroxy corresponding base
  modified_base (7)..(7): 2'-hydroxy corresponding base
  modified_base (8)..(8): 2'-O-methyl corresponding base
  modified_base (9)..(9): 2'-hydroxy corresponding base
  modified_base (10)..(10): 2'-hydroxy corresponding base
  modified_base (11)..(11): 2'-hydroxy corresponding base
  modified_base (12)..(12): 2'-hydroxy corresponding base
  modified_base (13)..(13): 2'-hydroxy corresponding base
  modified_base (14)..(14): 2'-hydroxy corresponding base
  modified_base (15)..(15): 2'-O-methyl corresponding base
  modified_base (16)..(16): 2'-hydroxy corresponding base
  modified_base (17)..(17): 2'-hydroxy corresponding base
  modified_base (18)..(18): 2'-hydroxy corresponding base
  modified_base (19)..(19): 2'-hydroxy corresponding base
  modified_base (20)..(20): deoxythymidine
  modified_base (21)..(21): 5'-thio thymidine
cuguacccacccgccagggtt

SEQ ID NO: 483 - DNA, 21 bp, Artificial Sequence
  Description of Artificial Sequence: Synthetic oligonucleotide
  Description of Combined DNA/RNA Molecule: Synthetic oligonucleotide
  siRNAs to PCSK9
  modified_base (1)..(1): 2'-hydroxy corresponding base
  modified_base (2)..(2): 2'-hydroxy corresponding base
  modified_base (3)..(3): 2'-hydroxy corresponding base
  modified_base (4)..(4): 2'-hydroxy corresponding base
  modified_base (5)..(5): 2'-hydroxy corresponding base
  modified_base (6)..(6): 2'-hydroxy corresponding base
  modified_base (7)..(7): 2'-hydroxy corresponding base
  modified_base (8)..(8): 2'-hydroxy corresponding base
  modified_base (9)..(9): 2'-hydroxy corresponding base
  modified_base (10)..(10): 2'-hydroxy corresponding base
  modified_base (11)..(11): 2'-hydroxy corresponding base
  modified_base (12)..(12): 2'-hydroxy corresponding base
  modified_base (13)..(13): 2'-hydroxy corresponding base
  modified_base (14)..(14): 2'-hydroxy corresponding base
  modified_base (15)..(15): 2'-hydroxy corresponding base
  modified_base (16)..(16): 2'-hydroxy corresponding base
  modified_base (17)..(17): 2'-hydroxy corresponding base
  modified_base (18)..(18): 2'-hydroxy corresponding base
  modified_base (19)..(19): 2'-hydroxy corresponding base
  modified_base (20)..(20): deoxythymidine
  modified_base (21)..(21): deoxythymidine
ccuggcggguggguacagctt

SEQ ID NO: 484 - DNA, 21 bp, Artificial Sequence
  Description of Artificial Sequence: Synthetic oligonucleotide
  Description of Combined DNA/RNA Molecule: Synthetic oligonucleotide
  siRNAs to PCSK9
  modified_base (1)..(1): 2'-hydroxy corresponding base
  modified_base (2)..(2): 2'-hydroxy corresponding base
  modified_base (3)..(3): 2'-hydroxy corresponding base
  modified_base (4)..(4): 2'-hydroxy corresponding base
  modified_base (5)..(5): 2'-hydroxy corresponding base
  modified_base (6)..(6): 2'-hydroxy corresponding base
  modified_base (7)..(7): 2'-hydroxy corresponding base
  modified_base (8)..(8): 2'-hydroxy corresponding base
  modified_base (9)..(9): 2'-hydroxy corresponding base
  modified_base (10)..(10): 2'-hydroxy corresponding base
  modified_base (11)..(11): 2'-hydroxy corresponding base
  modified_base (12)..(12): 2'-hydroxy corresponding base
  modified_base (13)..(13): 2'-hydroxy corresponding base
  modified_base (14)..(14): 2'-hydroxy corresponding base
  modified_base (15)..(15): 2'-hydroxy corresponding base
  modified_base (16)..(16): 2'-hydroxy corresponding base
  modified_base (17)..(17): 2'-hydroxy corresponding base
  modified_base (18)..(18): 2'-hydroxy corresponding base
  modified_base (19)..(19): 2'-hydroxy corresponding base
  modified_base (20)..(20): deoxythymidine
  modified_base (21)..(21): deoxythymidine
gcuguacccacccgccaggtt

SEQ ID NO: 485 - DNA, 21 bp, Artificial Sequence
  Description of Artificial Sequence: Synthetic oligonucleotide
  Description of Combined DNA/RNA Molecule: Synthetic oligonucleotide
  siRNAs to PCSK9
  modified_base (1)..(1): 2'-hydroxy corresponding base
  modified_base (2)..(2): 2'-hydroxy corresponding base
  modified_base (3)..(3): 2'-hydroxy corresponding base
  modified_base (4)..(4): 2'-hydroxy corresponding base
  modified_base (5)..(5): 2'-hydroxy corresponding base
  modified_base (6)..(6): 2'-hydroxy corresponding base
  modified_base (7)..(7): 2'-hydroxy corresponding base
  modified_base (8)..(8): 2'-hydroxy corresponding base
  modified_base (9)..(9): 2'-hydroxy corresponding base
  modified_base (10)..(10): 2'-hydroxy corresponding base
  modified_base (11)..(11): 2'-hydroxy corresponding base
  modified_base (12)..(12): 2'-hydroxy corresponding base
  modified_base (13)..(13): 2'-hydroxy corresponding base
  modified_base (14)..(14): 2'-hydroxy corresponding base
  modified_base (15)..(15): 2'-hydroxy corresponding base
  modified_base (16)..(16): 2'-hydroxy corresponding base
  modified_base (17)..(17): 2'-hydroxy corresponding base
  modified_base (18)..(18): 2'-hydroxy corresponding base
  modified_base (19)..(19): 2'-hydroxy corresponding base
  modified_base (20)..(20): deoxythymidine
  modified_base (21)..(21): 5'-thio thymidine
uggcggguggguacagccgtt

SEQ ID NO: 486 - DNA, 21 bp, Artificial Sequence
  Description of Artificial Sequence: Synthetic oligonucleotide
  Description of Combined DNA/RNA Molecule: Synthetic oligonucleotide
  siRNAs to PCSK9
  modified_base (1)..(1): 2'-hydroxy corresponding base
  modified_base (2)..(2): 2'-hydroxy corresponding base
  modified_base (3)..(3): 2'-hydroxy corresponding base
  modified_base (4)..(4): 2'-hydroxy corresponding base
  modified_base (5)..(5): 2'-hydroxy corresponding base
  modified_base (6)..(6): 2'-hydroxy corresponding base
  modified_base (7)..(7): 2'-hydroxy corresponding base
  modified_base (8)..(8): 2'-hydroxy corresponding base
  modified_base (9)..(9): 2'-hydroxy corresponding base
  modified_base (10)..(10): 2'-hydroxy corresponding base
  modified_base (11)..(11): 2'-hydroxy corresponding base
  modified_base (12)..(12): 2'-hydroxy corresponding base
  modified_base (13)..(13): 2'-hydroxy corresponding base
  modified_base (14)..(14): 2'-hydroxy corresponding base
  modified_base (15)..(15): 2'-hydroxy corresponding base
  modified_base (16)..(16): 2'-hydroxy corresponding base
  modified_base (17)..(17): 2'-hydroxy corresponding base
  modified_base (18)..(18): 2'-hydroxy corresponding base
  modified_base (19)..(19): 2'-hydroxy corresponding base
  modified_base (20)..(20): deoxythymidine
  modified_base (21)..(21): 5'-thio thymidine
cggcuguacccacccgccatt

SEQ ID NO: 487 - DNA, 21 bp, Artificial Sequence
  Description of Artificial Sequence: Synthetic oligonucleotide
  Description of Combined DNA/RNA Molecule: Synthetic oligonucleotide
  siRNAs to PCSK9
  modified_base (1)..(1): 2'-O-methyl corresponding base
  modified_base (2)..(2): 2'-hydroxy corresponding base
  modified_base (3)..(3): 2'-hydroxy corresponding base
  modified_base (4)..(4): 2'-O-methyl corresponding base
  modified_base (5)..(5): 2'-hydroxy corresponding base
  modified_base (6)..(6): 2'-hydroxy corresponding base
  modified_base (7)..(7): 2'-hydroxy corresponding base
  modified_base (8)..(8): 2'-O-methyl corresponding base
  modified_base (9)..(9): 2'-hydroxy corresponding base
  modified_base (10)..(10): 2'-hydroxy corresponding base
  modified_base (11)..(11): 2'-hydroxy corresponding base
  modified_base (12)..(12): 2'-O-methyl corresponding base
  modified_base (13)..(13): 2'-hydroxy corresponding base
  modified_base (14)..(14): 2'-O-methyl corresponding base
  modified_base (15)..(15): 2'-hydroxy corresponding base
  modified_base (16)..(16): 2'-hydroxy corresponding base
  modified_base (17)..(17): 2'-O-methyl corresponding base
  modified_base (18)..(18): 2'-O-methyl corresponding base
  modified_base (19)..(19): 2'-hydroxy corresponding base
  modified_base (20)..(20): deoxythymidine
  modified_base (21)..(21): 5'-thio thymidine
uggcggguggguacagccgtt

SEQ ID NO: 488 - DNA, 21 bp, Artificial Sequence
  Description of Artificial Sequence: Synthetic oligonucleotide
  Description of Combined DNA/RNA Molecule: Synthetic oligonucleotide
  siRNAs to PCSK9
  modified_base (1)..(1): 2'-hydroxy corresponding base
  modified_base (2)..(2): 2'-hydroxy corresponding base
  modified_base (3)..(3): 2'-hydroxy corresponding base
  modified_base (4)..(4): 2'-hydroxy corresponding base
  modified_base (5)..(5): 2'-hydroxy corresponding base
  modified_base (6)..(6): 2'-hydroxy corresponding base
  modified_base (7)..(7): 2'-O-methyl corresponding base
  modified_base (8)..(8): 2'-hydroxy corresponding base
  modified_base (9)..(9): 2'-hydroxy corresponding base
  modified_base (10)..(10): 2'-hydroxy corresponding base
  modified_base (11)..(11): 2'-O-methyl corresponding base
  modified_base (12)..(12): 2'-hydroxy corresponding base
  modified_base (13)..(13): 2'-hydroxy corresponding base
  modified_base (14)..(14): 2'-hydroxy corresponding base
  modified_base (15)..(15): 2'-hydroxy corresponding base
  modified_base (16)..(16): 2'-hydroxy corresponding base
  modified_base (17)..(17): 2'-hydroxy corresponding base
  modified_base (18)..(18): 2'-O-methyl corresponding base
  modified_base (19)..(19): 2'-hydroxy corresponding base
  modified_base (20)..(20): deoxythymidine
  modified_base (21)..(21): 5'-thio thymidine
cggcuguacccacccgccatt

SEQ ID NO: 489 - DNA, 21 bp, Artificial Sequence
  Description of Artificial Sequence: Synthetic oligonucleotide
  Description of Combined DNA/RNA Molecule: Synthetic oligonucleotide
  siRNAs to PCSK9
  modified_base (1)..(1): 2'-hydroxy corresponding base
  modified_base (2)..(2): 2'-hydroxy corresponding base
  modified_base (3)..(3): 2'-hydroxy corresponding base
  modified_base (4)..(4): 2'-hydroxy corresponding base
  modified_base (5)..(5): 2'-hydroxy corresponding base
  modified_base (6)..(6): 2'-hydroxy corresponding base
  modified_base (7)..(7): 2'-hydroxy corresponding base
  modified_base (8)..(8): 2'-hydroxy corresponding base
  modified_base (9)..(9): 2'-hydroxy corresponding base
  modified_base (10)..(10): 2'-hydroxy corresponding base
  modified_base (11)..(11): 2'-hydroxy corresponding base
  modified_base (12)..(12): 2'-hydroxy corresponding base
  modified_base (13)..(13): 2'-hydroxy corresponding base
  modified_base (14)..(14): 2'-hydroxy corresponding base
  modified_base (15)..(15): 2'-hydroxy corresponding base
  modified_base (16)..(16): 2'-hydroxy corresponding base
  modified_base (17)..(17): 2'-hydroxy corresponding base
  modified_base (18)..(18): 2'-hydroxy corresponding base
  modified_base (19)..(19): 2'-hydroxy corresponding base
  modified_base (20)..(20): deoxythymidine
  modified_base (21)..(21): deoxythymidine
ggcggguggguacagccgctt

SEQ ID NO: 490 - DNA, 21 bp, Artificial Sequence
  Description of Artificial Sequence: Synthetic oligonucleotide
  Description of Combined DNA/RNA Molecule: Synthetic oligonucleotide
  siRNAs to PCSK9
  modified_base (1)..(1): 2'-hydroxy corresponding base
  modified_base (2)..(2): 2'-hydroxy corresponding base
  modified_base (3)..(3): 2'-hydroxy corresponding base
  modified_base (4)..(4): 2'-hydroxy corresponding base
  modified_base (5)..(5): 2'-hydroxy corresponding base
  modified_base (6)..(6): 2'-hydroxy corresponding base
  modified_base (7)..(7): 2'-hydroxy corresponding base
  modified_base (8)..(8): 2'-hydroxy corresponding base
  modified_base (9)..(9): 2'-hydroxy corresponding base
  modified_base (10)..(10): 2'-hydroxy corresponding base
  modified_base (11)..(11): 2'-hydroxy corresponding base
  modified_base (12)..(12): 2'-hydroxy corresponding base
  modified_base (13)..(13): 2'-hydroxy corresponding base
  modified_base (14)..(14): 2'-hydroxy corresponding base
  modified_base (15)..(15): 2'-hydroxy corresponding base
  modified_base (16)..(16): 2'-hydroxy corresponding base
  modified_base (17)..(17): 2'-hydroxy corresponding base
  modified_base (18)..(18): 2'-hydroxy corresponding base
  modified_base (19)..(19): 2'-hydroxy corresponding base
  modified_base (20)..(20): deoxythymidine
  modified_base (21)..(21): deoxythymidine
gcggcuguacccacccgcctt

SEQ ID NO: 491 - DNA, 21 bp, Artificial Sequence
  Description of Artificial Sequence: Synthetic oligonucleotide
  Description of Combined DNA/RNA Molecule: Synthetic oligonucleotide
  siRNAs to PCSK9
  modified_base (1)..(1): 2'-hydroxy corresponding base
  modified_base (2)..(2): 2'-hydroxy corresponding base
  modified_base (3)..(3): 2'-hydroxy corresponding base
  modified_base (4)..(4): 2'-hydroxy corresponding base
  modified_base (5)..(5): 2'-hydroxy corresponding base
  modified_base (6)..(6): 2'-hydroxy corresponding base
  modified_base (7)..(7): 2'-hydroxy corresponding base
  modified_base (8)..(8): 2'-hydroxy corresponding base
  modified_base (9)..(9): 2'-hydroxy corresponding base
  modified_base (10)..(10): 2'-hydroxy corresponding base
  modified_base (11)..(11): 2'-hydroxy corresponding base
  modified_base (12)..(12): 2'-hydroxy corresponding base
  modified_base (13)..(13): 2'-hydroxy corresponding base
  modified_base (14)..(14): 2'-hydroxy corresponding base
  modified_base (15)..(15): 2'-hydroxy corresponding base
  modified_base (16)..(16): 2'-hydroxy corresponding base
  modified_base (17)..(17): 2'-hydroxy corresponding base
  modified_base (18)..(18): 2'-hydroxy corresponding base
  modified_base (19)..(19): 2'-hydroxy corresponding base
  modified_base (20)..(20): deoxythymidine
  modified_base (21)..(21): deoxythymidine
gguggguacagccgcgucctt

SEQ ID NO: 492 - DNA, 21 bp, Artificial Sequence
  Description of Artificial Sequence: Synthetic oligonucleotide
  Description of Combined DNA/RNA Molecule: Synthetic oligonucleotide
  siRNAs to PCSK9
  modified_base (1)..(1): 2'-hydroxy corresponding base
  modified_base (2)..(2): 2'-hydroxy corresponding base
  modified_base (3)..(3): 2'-hydroxy corresponding base
  modified_base (4)..(4): 2'-hydroxy corresponding base
  modified_base (5)..(5): 2'-hydroxy corresponding base
  modified_base (6)..(6): 2'-hydroxy corresponding base
  modified_base (7)..(7): 2'-hydroxy corresponding base
  modified_base (8)..(8): 2'-hydroxy corresponding base
  modified_base (9)..(9): 2'-hydroxy corresponding base
  modified_base (10)..(10): 2'-hydroxy corresponding base
  modified_base (11)..(11): 2'-hydroxy corresponding base
  modified_base (12)..(12): 2'-hydroxy corresponding base
  modified_base (13)..(13): 2'-hydroxy corresponding base
  modified_base (14)..(14): 2'-hydroxy corresponding base
  modified_base (15)..(15): 2'-hydroxy corresponding base
  modified_base (16)..(16): 2'-hydroxy corresponding base
  modified_base (17)..(17): 2'-hydroxy corresponding base
  modified_base (18)..(18): 2'-hydroxy corresponding base
  modified_base (19)..(19): 2'-hydroxy corresponding base
  modified_base (20)..(20): deoxythymidine
  modified_base (21)..(21): deoxythymidine
ggacgcggcuguacccacctt

SEQ ID NO: 493 - DNA, 21 bp, Artificial Sequence
  Description of Artificial Sequence: Synthetic oligonucleotide
  Description of Combined DNA/RNA Molecule: Synthetic oligonucleotide
  siRNAs to PCSK9
  modified_base (1)..(1): 2'-hydroxy corresponding base
  modified_base (2)..(2): 2'-hydroxy corresponding base
  modified_base (3)..(3): 2'-hydroxy corresponding base
  modified_base (4)..(4): 2'-hydroxy corresponding base
  modified_base (5)..(5): 2'-hydroxy corresponding base
  modified_base (6)..(6): 2'-hydroxy corresponding base
  modified_base (7)..(7): 2'-hydroxy corresponding base
  modified_base (8)..(8): 2'-hydroxy corresponding base
  modified_base (9)..(9): 2'-hydroxy corresponding base
  modified_base (10)..(10): 2'-hydroxy corresponding base
  modified_base (11)..(11): 2'-hydroxy corresponding base
  modified_base (12)..(12): 2'-hydroxy corresponding base
  modified_base (13)..(13): 2'-hydroxy corresponding base
  modified_base (14)..(14): 2'-hydroxy corresponding base
  modified_base (15)..(15): 2'-hydroxy corresponding base
  modified_base (16)..(16): 2'-hydroxy corresponding base
  modified_base (17)..(17): 2'-hydroxy corresponding base
  modified_base (18)..(18): 2'-hydroxy corresponding base
  modified_base (19)..(19): 2'-hydroxy corresponding base
  modified_base (20)..(20): deoxythymidine
  modified_base (21)..(21): deoxythymidine
uggguacagccgcguccuctt

SEQ ID NO: 494 - DNA, 21 bp, Artificial Sequence
  Description of Artificial Sequence: Synthetic oligonucleotide
  Description of Combined DNA/RNA Molecule: Synthetic oligonucleotide
  siRNAs to PCSK9
  modified_base (1)..(1): 2'-hydroxy corresponding base
  modified_base (2)..(2): 2'-hydroxy corresponding base
  modified_base (3)..(3): 2'-hydroxy corresponding base
  modified_base (4)..(4): 2'-hydroxy corresponding base
  modified_base (5)..(5): 2'-hydroxy corresponding base
  modified_base (6)..(6): 2'-hydroxy corresponding base
  modified_base (7)..(7): 2'-hydroxy corresponding base
  modified_base (8)..(8): 2'-hydroxy corresponding base
  modified_base (9)..(9): 2'-hydroxy corresponding base
  modified_base (10)..(10): 2'-hydroxy corresponding base
  modified_base (11)..(11): 2'-hydroxy corresponding base
  modified_base (12)..(12): 2'-hydroxy corresponding base
  modified_base (13)..(13): 2'-hydroxy corresponding base
  modified_base (14)..(14): 2'-hydroxy corresponding base
  modified_base (15)..(15): 2'-hydroxy corresponding base
  modified_base (16)..(16): 2'-hydroxy corresponding base
  modified_base (17)..(17): 2'-hydroxy corresponding base
  modified_base (18)..(18): 2'-hydroxy corresponding base
  modified_base (19)..(19): 2'-hydroxy corresponding base
  modified_base (20)..(20): deoxythymidine
  modified_base (21)..(21): deoxythymidine
gaggacgcggcuguacccatt

SEQ ID NO: 495 - DNA, 21 bp, Artificial Sequence
  Description of Artificial Sequence: Synthetic oligonucleotide
  Description of Combined DNA/RNA Molecule: Synthetic oligonucleotide
  siRNAs to PCSK9
  modified_base (1)..(1): 2'-hydroxy corresponding base
  modified_base (2)..(2): 2'-hydroxy corresponding base
  modified_base (3)..(3): 2'-hydroxy corresponding base
  modified_base (4)..(4): 2'-hydroxy corresponding base
  modified_base (5)..(5): 2'-hydroxy corresponding base
  modified_base (6)..(6): 2'-hydroxy corresponding base
  modified_base (7)..(7): 2'-hydroxy corresponding base
  modified_base (8)..(8): 2'-hydroxy corresponding base
  modified_base (9)..(9): 2'-hydroxy corresponding base
  modified_base (10)..(10): 2'-hydroxy corresponding base
  modified_base (11)..(11): 2'-hydroxy corresponding base
  modified_base (12)..(12): 2'-hydroxy corresponding base
  modified_base (13)..(13): 2'-hydroxy corresponding base
  modified_base (14)..(14): 2'-hydroxy corresponding base
  modified_base (15)..(15): 2'-hydroxy corresponding base
  modified_base (16)..(16): 2'-hydroxy corresponding base
  modified_base (17)..(17): 2'-hydroxy corresponding base
  modified_base (18)..(18): 2'-hydroxy corresponding base
  modified_base (19)..(19): 2'-hydroxy corresponding base
  modified_base (20)..(20): deoxythymidine
  modified_base (21)..(21): deoxythymidine
gccgcguccucaacgccgctt

SEQ ID NO: 496 - DNA, 21 bp, Artificial Sequence
  Description of Artificial Sequence: Synthetic oligonucleotide
  Description of Combined DNA/RNA Molecule: Synthetic oligonucleotide
  siRNAs to PCSK9
  modified_base (1)..(1): 2'-hydroxy corresponding base
  modified_base (2)..(2): 2'-hydroxy corresponding base
  modified_base (3)..(3): 2'-hydroxy corresponding base
  modified_base (4)..(4): 2'-hydroxy corresponding base
  modified_base (5)..(5): 2'-hydroxy corresponding base
  modified_base (6)..(6): 2'-hydroxy corresponding base
  modified_base (7)..(7): 2'-hydroxy corresponding base
  modified_base (8)..(8): 2'-hydroxy corresponding base
  modified_base (9)..(9): 2'-hydroxy corresponding base
  modified_base (10)..(10): 2'-hydroxy corresponding base
  modified_base (11)..(11): 2'-hydroxy corresponding base
  modified_base (12)..(12): 2'-hydroxy corresponding base
  modified_base (13)..(13): 2'-hydroxy corresponding base
  modified_base (14)..(14): 2'-hydroxy corresponding base
  modified_base (15)..(15): 2'-hydroxy corresponding base
  modified_base (16)..(16): 2'-hydroxy corresponding base
  modified_base (17)..(17): 2'-hydroxy corresponding base
  modified_base (18)..(18): 2'-hydroxy corresponding base
  modified_base (19)..(19): 2'-hydroxy corresponding base
  modified_base (20)..(20): deoxythymidine
  modified_base (21)..(21): deoxythymidine
gcggcguugaggacgcggctt

SEQ ID NO: 497 - DNA, 21 bp, Artificial Sequence
  Description of Artificial Sequence: Synthetic oligonucleotide
  Description of Combined DNA/RNA Molecule: Synthetic oligonucleotide
  siRNAs to PCSK9
  modified_base (1)..(1): 2'-hydroxy corresponding base
  modified_base (2)..(2): 2'-hydroxy corresponding base
  modified_base (3)..(3): 2'-hydroxy corresponding base
  modified_base (4)..(4): 2'-hydroxy corresponding base
  modified_base (5)..(5): 2'-hydroxy corresponding base
  modified_base (6)..(6): 2'-hydroxy corresponding base
  modified_base (7)..(7): 2'-hydroxy corresponding base
  modified_base (8)..(8): 2'-hydroxy corresponding base
  modified_base (9)..(9): 2'-hydroxy corresponding base
  modified_base (10)..(10): 2'-hydroxy corresponding base
  modified_base (11)..(11): 2'-hydroxy corresponding base
  modified_base (12)..(12): 2'-hydroxy corresponding base
  modified_base (13)..(13): 2'-hydroxy corresponding base
  modified_base (14)..(14): 2'-hydroxy corresponding base
  modified_base (15)..(15): 2'-hydroxy corresponding base
  modified_base (16)..(16): 2'-hydroxy corresponding base
  modified_base (17)..(17): 2'-hydroxy corresponding base
  modified_base (18)..(18): 2'-hydroxy corresponding base
  modified_base (19)..(19): 2'-hydroxy corresponding base
  modified_base (20)..(20): deoxythymidine
  modified_base (21)..(21): deoxythymidine
ccgcguccucaacgccgcctt

SEQ ID NO: 498 - DNA, 21 bp, Artificial Sequence
  Description of Artificial Sequence: Synthetic oligonucleotide
  Description of Combined DNA/RNA Molecule: Synthetic oligonucleotide
  siRNAs to PCSK9
  modified_base (1)..(1): 2'-hydroxy corresponding base
  modified_base (2)..(2): 2'-hydroxy corresponding base
  modified_base (3)..(3): 2'-hydroxy corresponding base
  modified_base (4)..(4): 2'-hydroxy corresponding base
  modified_base (5)..(5): 2'-hydroxy corresponding base
  modified_base (6)..(6): 2'-hydroxy corresponding base
  modified_base (7)..(7): 2'-hydroxy corresponding base
  modified_base (8)..(8): 2'-hydroxy corresponding base
  modified_base (9)..(9): 2'-hydroxy corresponding base
  modified_base (10)..(10): 2'-hydroxy corresponding base
  modified_base (11)..(11): 2'-hydroxy corresponding base
  modified_base (12)..(12): 2'-hydroxy corresponding base
  modified_base (13)..(13): 2'-hydroxy corresponding base
  modified_base (14)..(14): 2'-hydroxy corresponding base
  modified_base (15)..(15): 2'-hydroxy corresponding base
  modified_base (16)..(16): 2'-hydroxy corresponding base
  modified_base (17)..(17): 2'-hydroxy corresponding base
  modified_base (18)..(18): 2'-hydroxy corresponding base
  modified_base (19)..(19): 2'-hydroxy corresponding base
  modified_base (20)..(20): deoxythymidine
  modified_base (21)..(21): deoxythymidine
ggcggcguugaggacgcggtt

SEQ ID NO: 499 - DNA, 21 bp, Artificial Sequence
  Description of Artificial Sequence: Synthetic oligonucleotide
  Description of Combined DNA/RNA Molecule: Synthetic oligonucleotide
  siRNAs to PCSK9
  modified_base (1)..(1): 2'-hydroxy corresponding base
  modified_base (2)..(2): 2'-hydroxy corresponding base
  modified_base (3)..(3): 2'-hydroxy corresponding base
  modified_base (4)..(4): 2'-hydroxy corresponding base
  modified_base (5)..(5): 2'-hydroxy corresponding base
  modified_base (6)..(6): 2'-hydroxy corresponding base
  modified_base (7)..(7): 2'-hydroxy corresponding base
  modified_base (8)..(8): 2'-hydroxy corresponding base
  modified_base (9)..(9): 2'-hydroxy corresponding base
  modified_base (10)..(10): 2'-hydroxy corresponding base
  modified_base (11)..(11): 2'-hydroxy corresponding base
  modified_base (12)..(12): 2'-hydroxy corresponding base
  modified_base (13)..(13): 2'-hydroxy corresponding base
  modified_base (14)..(14): 2'-hydroxy corresponding base
  modified_base (15)..(15): 2'-hydroxy corresponding base
  modified_base (16)..(16): 2'-hydroxy corresponding base
  modified_base (17)..(17): 2'-hydroxy corresponding base
  modified_base (18)..(18): 2'-hydroxy corresponding base
  modified_base (19)..(19): 2'-hydroxy corresponding base
  modified_base (20)..(20): deoxythymidine
  modified_base (21)..(21): 5'-thio thymidine
gucgugcuggucaccgcugtt

SEQ ID NO: 500 - DNA, 21 bp, Artificial Sequence
  Description of Artificial Sequence: Synthetic oligonucleotide
  Description of Combined DNA/RNA Molecule: Synthetic oligonucleotide
  siRNAs to PCSK9
  modified_base (1)..(1): 2'-hydroxy corresponding base
  modified_base (2)..(2): 2'-hydroxy corresponding base
  modified_base (3)..(3): 2'-hydroxy corresponding base
  modified_base (4)..(4): 2'-hydroxy corresponding base
  modified_base (5)..(5): 2'-hydroxy corresponding base
  modified_base (6)..(6): 2'-hydroxy corresponding base
  modified_base (7)..(7): 2'-hydroxy corresponding base
  modified_base (8)..(8): 2'-hydroxy corresponding base
  modified_base (9)..(9): 2'-hydroxy corresponding base
  modified_base (10)..(10): 2'-hydroxy corresponding base
  modified_base (11)..(11): 2'-hydroxy corresponding base
  modified_base (12)..(12): 2'-hydroxy corresponding base
  modified_base (13)..(13): 2'-hydroxy corresponding base
  modified_base (14)..(14): 2'-hydroxy corresponding base
  modified_base (15)..(15): 2'-hydroxy corresponding base
  modified_base (16)..(16): 2'-hydroxy corresponding base
  modified_base (17)..(17): 2'-hydroxy corresponding base
  modified_base (18)..(18): 2'-hydroxy corresponding base
  modified_base (19)..(19): 2'-hydroxy corresponding base
  modified_base (20)..(20): deoxythymidine
  modified_base (21)..(21): 5'-thio thymidine
cagcggugaccagcacgactt

SEQ ID NO: 501 - DNA, 21 bp, Artificial Sequence
  Description of Artificial Sequence: Synthetic oligonucleotide
  Description of Combined DNA/RNA Molecule: Synthetic oligonucleotide
  siRNAs to PCSK9
  modified_base (1)..(1): 2'-hydroxy corresponding base
  modified_base (2)..(2): 2'-O-methyl corresponding base
  modified_base (3)..(3): 2'-O-methyl corresponding base
  modified_base (4)..(4): 2'-hydroxy corresponding base
  modified_base (5)..(5): 2'-O-methyl corresponding base
  modified_base (6)..(6): 2'-hydroxy corresponding base
  modified_base (7)..(7): 2'-O-methyl corresponding base
  modified_base (8)..(8): 2'-O-methyl corresponding base
  modified_base (9)..(9): 2'-hydroxy corresponding base
  modified_base (10)..(10): 2'-hydroxy corresponding base
  modified_base (11)..(11): 2'-O-methyl corresponding base
  modified_base (12)..(12): 2'-O-methyl corresponding base
  modified_base (13)..(13): 2'-hydroxy corresponding base
  modified_base (14)..(14): 2'-O-methyl corresponding base
  modified_base (15)..(15): 2'-O-methyl corresponding base
  modified_base (16)..(16): 2'-hydroxy corresponding base
  modified_base (17)..(17): 2'-O-methyl corresponding base
  modified_base (18)..(18): 2'-O-methyl corresponding base
  modified_base (19)..(19): 2'-hydroxy corresponding base
  modified_base (20)..(20): deoxythymidine
  modified_base (21)..(21): 5'-thio thymidine
gucgugcuggucaccgcugtt

SEQ ID NO: 502 - DNA, 21 bp, Artificial Sequence
  Description of Artificial Sequence: Synthetic oligonucleotide
  Description of Combined DNA/RNA Molecule: Synthetic oligonucleotide
  siRNAs to PCSK9
  modified_base (1)..(1): 2'-O-methyl corresponding base
  modified_base (2)..(2): 2'-hydroxy corresponding base
  modified_base (3)..(3): 2'-hydroxy corresponding base
  modified_base (4)..(4): 2'-hydroxy corresponding base
  modified_base (5)..(5): 2'-hydroxy corresponding base
  modified_base (6)..(6): 2'-hydroxy corresponding base
  modified_base (7)..(7): 2'-hydroxy corresponding base
  modified_base (8)..(8): 2'-hydroxy corresponding base
  modified_base (9)..(9): 2'-hydroxy corresponding base
  modified_base (10)..(10): 2'-hydroxy corresponding base
  modified_base (11)..(11): 2'-O-methyl corresponding base
  modified_base (12)..(12): 2'-hydroxy corresponding base
  modified_base (13)..(13): 2'-hydroxy corresponding base
  modified_base (14)..(14): 2'-O-methyl corresponding base
  modified_base (15)..(15): 2'-hydroxy corresponding base
  modified_base (16)..(16): 2'-hydroxy corresponding base
  modified_base (17)..(17): 2'-hydroxy corresponding base
  modified_base (18)..(18): 2'-hydroxy corresponding base
  modified_base (19)..(19): 2'-hydroxy corresponding base
  modified_base (20)..(20): deoxythymidine
  modified_base (21)..(21): 5'-thio thymidine
cagcggugaccagcacgactt

SEQ ID NO: 503 - DNA, 21 bp, Artificial Sequence
  Description of Artificial Sequence: Synthetic oligonucleotide
  Description of Combined DNA/RNA Molecule: Synthetic oligonucleotide
  siRNAs to PCSK9
  modified_base (1)..(1): 2'-hydroxy corresponding base
  modified_base (2)..(2): 2'-hydroxy corresponding base
  modified_base (3)..(3): 2'-hydroxy corresponding base
  modified_base (4)..(4): 2'-hydroxy corresponding base
  modified_base (5)..(5): 2'-hydroxy corresponding base
  modified_base (6)..(6): 2'-hydroxy corresponding base
  modified_base (7)..(7): 2'-hydroxy corresponding base
  modified_base (8)..(8): 2'-hydroxy corresponding base
  modified_base (9)..(9): 2'-hydroxy corresponding base
  modified_base (10)..(10): 2'-hydroxy corresponding base
  modified_base (11)..(11): 2'-hydroxy corresponding base
  modified_base (12)..(12): 2'-hydroxy corresponding base
  modified_base (13)..(13): 2'-hydroxy corresponding base
  modified_base (14)..(14): 2'-hydroxy corresponding base
  modified_base (15)..(15): 2'-hydroxy corresponding base
  modified_base (16)..(16): 2'-hydroxy corresponding base
  modified_base (17)..(17): 2'-hydroxy corresponding base
  modified_base (18)..(18): 2'-hydroxy corresponding base
  modified_base (19)..(19): 2'-hydroxy corresponding base
  modified_base (20)..(20): deoxythymidine
  modified_base (21)..(21): 5'-thio thymidine
ucgugcuggucaccgcugctt

SEQ ID NO: 504 - DNA, 21 bp, Artificial Sequence
  Description of Artificial Sequence: Synthetic oligonucleotide
  Description of Combined DNA/RNA Molecule: Synthetic oligonucleotide
  siRNAs to PCSK9
  modified_base (1)..(1): 2'-hydroxy corresponding base
  modified_base (2)..(2): 2'-hydroxy corresponding base
  modified_base (3)..(3): 2'-hydroxy corresponding base
  modified_base (4)..(4): 2'-hydroxy corresponding base
  modified_base (5)..(5): 2'-hydroxy corresponding base
  modified_base (6)..(6): 2'-hydroxy corresponding base
  modified_base (7)..(7): 2'-hydroxy corresponding base
  modified_base (8)..(8): 2'-hydroxy corresponding base
  modified_base (9)..(9): 2'-hydroxy corresponding base
  modified_base (10)..(10): 2'-hydroxy corresponding base
  modified_base (11)..(11): 2'-hydroxy corresponding base
  modified_base (12)..(12): 2'-hydroxy corresponding base
  modified_base (13)..(13): 2'-hydroxy corresponding base
  modified_base (14)..(14): 2'-hydroxy corresponding base
  modified_base (15)..(15): 2'-hydroxy corresponding base
  modified_base (16)..(16): 2'-hydroxy corresponding base
  modified_base (17)..(17): 2'-hydroxy corresponding base
  modified_base (18)..(18): 2'-hydroxy corresponding base
  modified_base (19)..(19): 2'-hydroxy corresponding base
  modified_base (20)..(20): deoxythymidine
  modified_base (21)..(21): 5'-thio thymidine
gcagcggugaccagcacgatt

SEQ ID NO: 505 - DNA, 21 bp, Artificial Sequence
  Description of Artificial Sequence: Synthetic oligonucleotide
  Description of Combined DNA/RNA Molecule: Synthetic oligonucleotide
  siRNAs to PCSK9
  modified_base (1)..(1): 2'-O-methyl corresponding base
  modified_base (2)..(2): 2'-O-methyl corresponding base
  modified_base (3)..(3): 2'-hydroxy corresponding base
  modified_base (4)..(4): 2'-O-methyl corresponding base
  modified_base (5)..(5): 2'-hydroxy corresponding base
  modified_base (6)..(6): 2'-O-methyl corresponding base
  modified_base (7)..(7): 2'-O-methyl corresponding base
  modified_base (8)..(8): 2'-hydroxy corresponding base
  modified_base (9)..(9): 2'-hydroxy corresponding base
  modified_base (10)..(10): 2'-O-methyl corresponding base
  modified_base (11)..(11): 2'-O-methyl corresponding base
  modified_base (12)..(12): 2'-hydroxy corresponding base
  modified_base (13)..(13): 2'-O-methyl corresponding base
  modified_base (14)..(14): 2'-O-methyl corresponding base
  modified_base (15)..(15): 2'-hydroxy corresponding base
  modified_base (16)..(16): 2'-O-methyl corresponding base
  modified_base (17)..(17): 2'-O-methyl corresponding base
  modified_base (18)..(18): 2'-hydroxy corresponding base
  modified_base (19)..(19): 2'-O-methyl corresponding base
  modified_base (20)..(20): deoxythymidine
  modified_base (21)..(21): 5'-thio thymidine
ucgugcuggucaccgcugctt

SEQ ID NO: 506 - DNA, 21 bp, Artificial Sequence
  Description of Artificial Sequence: Synthetic oligonucleotide
  Description of Combined DNA/RNA Molecule: Synthetic oligonucleotide
  siRNAs to PCSK9
  modified_base (1)..(1): 2'-hydroxy corresponding base
  modified_base (2)..(2): 2'-O-methyl corresponding base
  modified_base (3)..(3): 2'-hydroxy corresponding base
  modified_base (4)..(4): 2'-hydroxy corresponding base
  modified_base (5)..(5): 2'-hydroxy corresponding base
  modified_base (6)..(6): 2'-hydroxy corresponding base
  modified_base (7)..(7): 2'-hydroxy corresponding base
  modified_base (8)..(8): 2'-hydroxy corresponding base
  modified_base (9)..(9): 2'-hydroxy corresponding base
  modified_base (10)..(10): 2'-hydroxy corresponding base
  modified_base (11)..(11): 2'-hydroxy corresponding base
  modified_base (12)..(12): 2'-O-methyl corresponding base
  modified_base (13)..(13): 2'-hydroxy corresponding base
  modified_base (14)..(14): 2'-hydroxy corresponding base
  modified_base (15)..(15): 2'-O-methyl corresponding base
  modified_base (16)..(16): 2'-hydroxy corresponding base
  modified_base (17)..(17): 2'-hydroxy corresponding base
  modified_base (18)..(18): 2'-hydroxy corresponding base
  modified_base (19)..(19): 2'-hydroxy corresponding base
  modified_base (20)..(20): deoxythymidine
  modified_base (21)..(21): 5'-thio thymidine
gcagcggugaccagcacgatt

SEQ ID NO: 507 - DNA, 21 bp, Artificial Sequence
  Description of Artificial Sequence: Synthetic oligonucleotide
  Description of Combined DNA/RNA Molecule: Synthetic oligonucleotide
  siRNAs to PCSK9
  modified_base (1)..(1): 2'-hydroxy corresponding base
  modified_base (2)..(2): 2'-hydroxy corresponding base
  modified_base (3)..(3): 2'-hydroxy corresponding base
  modified_base (4)..(4): 2'-hydroxy corresponding base
  modified_base (5)..(5): 2'-hydroxy corresponding base
  modified_base (6)..(6): 2'-hydroxy corresponding base
  modified_base (7)..(7): 2'-hydroxy corresponding base
  modified_base (8)..(8): 2'-hydroxy corresponding base
  modified_base (9)..(9): 2'-hydroxy corresponding base
  modified_base (10)..(10): 2'-hydroxy corresponding base
  modified_base (11)..(11): 2'-hydroxy corresponding base
  modified_base (12)..(12): 2'-hydroxy corresponding base
  modified_base (13)..(13): 2'-hydroxy corresponding base
  modified_base (14)..(14): 2'-hydroxy corresponding base
  modified_base (15)..(15): 2'-hydroxy corresponding base
  modified_base (16)..(16): 2'-hydroxy corresponding base
  modified_base (17)..(17): 2'-hydroxy corresponding base
  modified_base (18)..(18): 2'-hydroxy corresponding base
  modified_base (19)..(19): 2'-hydroxy corresponding base
  modified_base (20)..(20): deoxythymidine
  modified_base (21)..(21): 5'-thio thymidine
uggucaccgcugccggcaatt

SEQ ID NO: 508 - DNA, 21 bp, Artificial Sequence
  Description of Artificial Sequence: Synthetic oligonucleotide
  Description of Combined DNA/RNA Molecule: Synthetic oligonucleotide
  siRNAs to PCSK9
  modified_base (1)..(1): 2'-hydroxy corresponding base
  modified_base (2)..(2): 2'-hydroxy corresponding base
  modified_base (3)..(3): 2'-hydroxy corresponding base
  modified_base (4)..(4): 2'-hydroxy corresponding base
  modified_base (5)..(5): 2'-hydroxy corresponding base
  modified_base (6)..(6): 2'-hydroxy corresponding base
  modified_base (7)..(7): 2'-hydroxy corresponding base
  modified_base (8)..(8): 2'-hydroxy corresponding base
  modified_base (9)..(9): 2'-hydroxy corresponding base
  modified_base (10)..(10): 2'-hydroxy corresponding base
  modified_base (11)..(11): 2'-hydroxy corresponding base
  modified_base (12)..(12): 2'-hydroxy corresponding base
  modified_base (13)..(13): 2'-hydroxy corresponding base
  modified_base (14)..(14): 2'-hydroxy corresponding base
  modified_base (15)..(15): 2'-hydroxy corresponding base
  modified_base (16)..(16): 2'-hydroxy corresponding base
  modified_base (17)..(17): 2'-hydroxy corresponding base
  modified_base (18)..(18): 2'-hydroxy corresponding base
  modified_base (19)..(19): 2'-hydroxy corresponding base
  modified_base (20)..(20): deoxythymidine
  modified_base (21)..(21): 5'-thio thymidine
uugccggcagcggugaccatt

SEQ ID NO: 509 - DNA, 21 bp, Artificial Sequence
  Description of Artificial Sequence: Synthetic oligonucleotide
  Description of Combined DNA/RNA Molecule: Synthetic oligonucleotide
  siRNAs to PCSK9
  modified_base (1)..(1): 2'-O-methyl corresponding base
  modified_base (2)..(2): 2'-hydroxy corresponding base
  modified_base (3)..(3): 2'-hydroxy corresponding base
  modified_base (4)..(4): 2'-O-methyl corresponding base
  modified_base (5)..(5): 2'-O-methyl corresponding base
  modified_base (6)..(6): 2'-hydroxy corresponding base
  modified_base (7)..(7): 2'-O-methyl corresponding base
  modified_base (8)..(8): 2'-O-methyl corresponding base
  modified_base (9)..(9): 2'-hydroxy corresponding base
  modified_base (10)..(10): 2'-O-methyl corresponding base
  modified_base (11)..(11): 2'-O-methyl corresponding base
  modified_base (12)..(12): 2'-hydroxy corresponding base
  modified_base (13)..(13): 2'-O-methyl corresponding base
  modified_base (14)..(14): 2'-O-methyl corresponding base
  modified_base (15)..(15): 2'-hydroxy corresponding base
  modified_base (16)..(16): 2'-hydroxy corresponding base
  modified_base (17)..(17): 2'-O-methyl corresponding base
  modified_base (18)..(18): 2'-hydroxy corresponding base
  modified_base (19)..(19): 2'-hydroxy corresponding base
  modified_base (20)..(20): deoxythymidine
  modified_base (21)..(21): 5'-thio thymidine
uggucaccgcugccggcaatt

SEQ ID NO: 510 - DNA, 21 bp, Artificial Sequence
  Description of Artificial Sequence: Synthetic oligonucleotide
  Description of Combined DNA/RNA Molecule: Synthetic oligonucleotide
  siRNAs to PCSK9
  modified_base (1)..(1): 2'-hydroxy corresponding base
  modified_base (2)..(2): 2'-hydroxy corresponding base
  modified_base (3)..(3): 2'-hydroxy corresponding base
  modified_base (4)..(4): 2'-hydroxy corresponding base
  modified_base (5)..(5): 2'-hydroxy corresponding base
  modified_base (6)..(6): 2'-hydroxy corresponding base
  modified_base (7)..(7): 2'-hydroxy corresponding base
  modified_base (8)..(8): 2'-O-methyl corresponding base
  modified_base (9)..(9): 2'-hydroxy corresponding base
  modified_base (10)..(10): 2'-hydroxy corresponding base
  modified_base (11)..(11): 2'-hydroxy corresponding base
  modified_base (12)..(12): 2'-hydroxy corresponding base
  modified_base (13)..(13): 2'-hydroxy corresponding base
  modified_base (14)..(14): 2'-hydroxy corresponding base
  modified_base (15)..(15): 2'-hydroxy corresponding base
  modified_base (16)..(16): 2'-hydroxy corresponding base
  modified_base (17)..(17): 2'-hydroxy corresponding base
  modified_base (18)..(18): 2'-O-methyl corresponding base
  modified_base (19)..(19): 2'-hydroxy corresponding base
  modified_base (20)..(20): deoxythymidine
  modified_base (21)..(21): 5'-thio thymidine
uugccggcagcggugaccatt

SEQ ID NO: 511 - DNA, 21 bp, Artificial Sequence
  Description of Artificial Sequence: Synthetic oligonucleotide
  Description of Combined DNA/RNA Molecule: Synthetic oligonucleotide
  siRNAs to PCSK9
  modified_base (1)..(1): 2'-hydroxy corresponding base
  modified_base (2)..(2): 2'-hydroxy corresponding base
  modified_base (3)..(3): 2'-hydroxy corresponding base
  modified_base (4)..(4): 2'-hydroxy corresponding base
  modified_base (5)..(5): 2'-hydroxy corresponding base
  modified_base (6)..(6): 2'-hydroxy corresponding base
  modified_base (7)..(7): 2'-hydroxy corresponding base
  modified_base (8)..(8): 2'-hydroxy corresponding base
  modified_base (9)..(9): 2'-hydroxy corresponding base
  modified_base (10)..(10): 2'-hydroxy corresponding base
  modified_base (11)..(11): 2'-hydroxy corresponding base
  modified_base (12)..(12): 2'-hydroxy corresponding base
  modified_base (13)..(13): 2'-hydroxy corresponding base
  modified_base (14)..(14): 2'-hydroxy corresponding base
  modified_base (15)..(15): 2'-hydroxy corresponding base
  modified_base (16)..(16): 2'-hydroxy corresponding base
  modified_base (17)..(17): 2'-hydroxy corresponding base
  modified_base (18)..(18): 2'-hydroxy corresponding base
  modified_base (19)..(19): 2'-hydroxy corresponding base
  modified_base (20)..(20): deoxythymidine
  modified_base (21)..(21): 5'-thio thymidine
ggucaccgcugccggcaactt

SEQ ID NO: 512 - DNA, 21 bp, Artificial Sequence
  Description of Artificial Sequence: Synthetic oligonucleotide
  Description of Combined DNA/RNA Molecule: Synthetic oligonucleotide
  siRNAs to PCSK9
  modified_base (1)..(1): 2'-hydroxy corresponding base
  modified_base (2)..(2): 2'-hydroxy corresponding base
  modified_base (3)..(3): 2'-hydroxy corresponding base
  modified_base (4)..(4): 2'-hydroxy corresponding base
  modified_base (5)..(5): 2'-hydroxy corresponding base
  modified_base (6)..(6): 2'-hydroxy corresponding base
  modified_base (7)..(7): 2'-hydroxy corresponding base
  modified_base (8)..(8): 2'-hydroxy corresponding base
  modified_base (9)..(9): 2'-hydroxy corresponding base
  modified_base (10)..(10): 2'-hydroxy corresponding base
  modified_base (11)..(11): 2'-hydroxy corresponding base
  modified_base (12)..(12): 2'-hydroxy corresponding base
  modified_base (13)..(13): 2'-hydroxy corresponding base
  modified_base (14)..(14): 2'-hydroxy corresponding base
  modified_base (15)..(15): 2'-hydroxy corresponding base
  modified_base (16)..(16): 2'-hydroxy corresponding base
  modified_base (17)..(17): 2'-hydroxy corresponding base
  modified_base (18)..(18): 2'-hydroxy corresponding base
  modified_base (19)..(19): 2'-hydroxy corresponding base
  modified_base (20)..(20): deoxythymidine
  modified_base (21)..(21): 5'-thio thymidine
guugccggcagcggugacctt

SEQ ID NO: 513 - DNA, 21 bp, Artificial Sequence
  Description of Artificial Sequence: Synthetic oligonucleotide
  Description of Combined DNA/RNA Molecule: Synthetic oligonucleotide
  siRNAs to PCSK9
  modified_base (1)..(1): 2'-hydroxy corresponding base
  modified_base (2)..(2): 2'-hydroxy corresponding base
  modified_base (3)..(3): 2'-O-methyl corresponding base
  modified_base (4)..(4): 2'-O-methyl corresponding base
  modified_base (5)..(5): 2'-hydroxy corresponding base
  modified_base (6)..(6): 2'-O-methyl corresponding base
  modified_base (7)..(7): 2'-O-methyl corresponding base
  modified_base (8)..(8): 2'-hydroxy corresponding base
  modified_base (9)..(9): 2'-O-methyl corresponding base
  modified_base (10)..(10): 2'-O-methyl corresponding base
  modified_base (11)..(11): 2'-hydroxy corresponding base
  modified_base (12)..(12): 2'-O-methyl corresponding base
  modified_base (13)..(13): 2'-O-methyl corresponding base
  modified_base (14)..(14): 2'-hydroxy corresponding base
  modified_base (15)..(15): 2'-hydroxy corresponding base
  modified_base (16)..(16): 2'-O-methyl corresponding base
  modified_base (17)..(17): 2'-hydroxy corresponding base
  modified_base (18)..(18): 2'-hydroxy corresponding base
  modified_base (19)..(19): 2'-O-methyl corresponding base
  modified_base (20)..(20): deoxythymidine
  modified_base (21)..(21): 5'-thio thymidine
ggucaccgcugccggcaactt

SEQ ID NO: 514 - DNA, 21 bp, Artificial Sequence
  Description of Artificial Sequence: Synthetic oligonucleotide
  Description of Combined DNA/RNA Molecule: Synthetic oligonucleotide
  siRNAs to PCSK9
  modified_base (1)..(1): 2'-hydroxy corresponding base
  modified_base (2)..(2): 2'-hydroxy corresponding base
  modified_base (3)..(3): 2'-hydroxy corresponding base
  modified_base (4)..(4): 2'-hydroxy corresponding base
  modified_base (5)..(5): 2'-hydroxy corresponding base
  modified_base (6)..(6): 2'-hydroxy corresponding base
  modified_base (7)..(7): 2'-hydroxy corresponding base
  modified_base (8)..(8): 2'-hydroxy corresponding base
  modified_base (9)..(9): 2'-O-methyl corresponding base
  modified_base (10)..(10): 2'-hydroxy corresponding base
  modified_base (11)..(11): 2'-hydroxy corresponding base
  modified_base (12)..(12): 2'-hydroxy corresponding base
  modified_base (13)..(13): 2'-hydroxy corresponding base
  modified_base (14)..(14): 2'-hydroxy corresponding base
  modified_base (15)..(15): 2'-hydroxy corresponding base
  modified_base (16)..(16): 2'-hydroxy corresponding base
  modified_base (17)..(17): 2'-hydroxy corresponding base
  modified_base (18)..(18): 2'-hydroxy corresponding base
  modified_base (19)..(19): 2'-hydroxy corresponding base
  modified_base (20)..(20): deoxythymidine
  modified_base (21)..(21): 5'-thio thymidine
guugccggcagcggugacctt

SEQ ID NO: 515 - DNA, 21 bp, Artificial Sequence
  Description of Artificial Sequence: Synthetic oligonucleotide
  Description of Combined DNA/RNA Molecule: Synthetic oligonucleotide
  siRNAs to PCSK9
  modified_base (1)..(1): 2'-hydroxy corresponding base
  modified_base (2)..(2): 2'-hydroxy corresponding base
  modified_base (3)..(3): 2'-hydroxy corresponding base
  modified_base (4)..(4): 2'-hydroxy corresponding base
  modified_base (5)..(5): 2'-hydroxy corresponding base
  modified_base (6)..(6): 2'-hydroxy corresponding base
  modified_base (7)..(7): 2'-hydroxy corresponding base
  modified_base (8)..(8): 2'-hydroxy corresponding base
  modified_base (9)..(9): 2'-hydroxy corresponding base
  modified_base (10)..(10): 2'-hydroxy corresponding base
  modified_base (11)..(11): 2'-hydroxy corresponding base
  modified_base (12)..(12): 2'-hydroxy corresponding base
  modified_base (13)..(13): 2'-hydroxy corresponding base
  modified_base (14)..(14): 2'-hydroxy corresponding base
  modified_base (15)..(15): 2'-hydroxy corresponding base
  modified_base (16)..(16): 2'-hydroxy corresponding base
  modified_base (17)..(17): 2'-hydroxy corresponding base
  modified_base (18)..(18): 2'-hydroxy corresponding base
  modified_base (19)..(19): 2'-hydroxy corresponding base
  modified_base (20)..(20): deoxythymidine
  modified_base (21)..(21): 5'-thio thymidine
caccgcugccggcaacuuctt

SEQ ID NO: 516 - DNA, 21 bp, Artificial Sequence
  Description of Artificial Sequence: Synthetic oligonucleotide
  Description of Combined DNA/RNA Molecule: Synthetic oligonucleotide
  siRNAs to PCSK9
  modified_base (1)..(1): 2'-hydroxy corresponding base
  modified_base (2)..(2): 2'-hydroxy corresponding base
  modified_base (3)..(3): 2'-hydroxy corresponding base
  modified_base (4)..(4): 2'-hydroxy corresponding base
  modified_base (5)..(5): 2'-hydroxy corresponding base
  modified_base (6)..(6): 2'-hydroxy corresponding base
  modified_base (7)..(7): 2'-hydroxy corresponding base
  modified_base (8)..(8): 2'-hydroxy corresponding base
  modified_base (9)..(9): 2'-hydroxy corresponding base
  modified_base (10)..(10): 2'-hydroxy corresponding base
  modified_base (11)..(11): 2'-hydroxy corresponding base
  modified_base (12)..(12): 2'-hydroxy corresponding base
  modified_base (13)..(13): 2'-hydroxy corresponding base
  modified_base (14)..(14): 2'-hydroxy corresponding base
  modified_base (15)..(15): 2'-hydroxy corresponding base
  modified_base (16)..(16): 2'-hydroxy corresponding base
  modified_base (17)..(17): 2'-hydroxy corresponding base
  modified_base (18)..(18): 2'-hydroxy corresponding base
  modified_base (19)..(19): 2'-hydroxy corresponding base
  modified_base (20)..(20): deoxythymidine
  modified_base (21)..(21): 5'-thio thymidine
gaaguugccggcagcggugtt

SEQ ID NO: 517 - DNA, 21 bp, Artificial Sequence
  Description of Artificial Sequence: Synthetic oligonucleotide
  Description of Combined DNA/RNA Molecule: Synthetic oligonucleotide
  siRNAs to PCSK9
  modified_base (1)..(1): 2'-O-methyl corresponding base
  modified_base (2)..(2): 2'-hydroxy corresponding base
  modified_base (3)..(3): 2'-O-methyl corresponding base
  modified_base (4)..(4): 2'-O-methyl corresponding base
  modified_base (5)..(5): 2'-hydroxy corresponding base
  modified_base (6)..(6): 2'-O-methyl corresponding base
  modified_base (7)..(7): 2'-O-methyl corresponding base
  modified_base (8)..(8): 2'-hydroxy corresponding base
  modified_base (9)..(9): 2'-O-methyl corresponding base
  modified_base (10)..(10): 2'-O-methyl corresponding base
  modified_base (11)..(11): 2'-hydroxy corresponding base
  modified_base (12)..(12): 2'-hydroxy corresponding base
  modified_base (13)..(13): 2'-O-methyl corresponding base
  modified_base (14)..(14): 2'-hydroxy corresponding base
  modified_base (15)..(15): 2'-hydroxy corresponding base
  modified_base (16)..(16): 2'-O-methyl corresponding base
  modified_base (17)..(17): 2'-O-methyl corresponding base
  modified_base (18)..(18): 2'-O-methyl corresponding base
  modified_base (19)..(19): 2'-O-methyl corresponding base
  modified_base (20)..(20): deoxythymidine
  modified_base (21)..(21): 5'-thio thymidine
caccgcugccggcaacuuctt

SEQ ID NO: 518 - DNA, 21 bp, Artificial Sequence
  Description of Artificial Sequence: Synthetic oligonucleotide
  Description of Combined DNA/RNA Molecule: Synthetic oligonucleotide
  siRNAs to PCSK9
  modified_base (1)..(1): 2'-hydroxy corresponding base
  modified_base (2)..(2): 2'-hydroxy corresponding base
  modified_base (3)..(3): 2'-hydroxy corresponding base
  modified_base (4)..(4): 2'-hydroxy corresponding base
  modified_base (5)..(5): 2'-hydroxy corresponding base
  modified_base (6)..(6): 2'-hydroxy corresponding base
  modified_base (7)..(7): 2'-hydroxy corresponding base
  modified_base (8)..(8): 2'-hydroxy corresponding base
  modified_base (9)..(9): 2'-hydroxy corresponding base
  modified_base (10)..(10): 2'-hydroxy corresponding base
  modified_base (11)..(11): 2'-hydroxy corresponding base
  modified_base (12)..(12): 2'-O-methyl corresponding base
  modified_base (13)..(13): 2'-hydroxy corresponding base
  modified_base (14)..(14): 2'-hydroxy corresponding base
  modified_base (15)..(15): 2'-hydroxy corresponding base
  modified_base (16)..(16): 2'-hydroxy corresponding base
  modified_base (17)..(17): 2'-hydroxy corresponding base
  modified_base (18)..(18): 2'-hydroxy corresponding base
  modified_base (19)..(19): 2'-hydroxy corresponding base
  modified_base (20)..(20): deoxythymidine
  modified_base (21)..(21): 5'-thio thymidine
gaaguugccggcagcggugtt

SEQ ID NO: 519 - DNA, 21 bp, Artificial Sequence
  Description of Artificial Sequence: Synthetic oligonucleotide
  Description of Combined DNA/RNA Molecule: Synthetic oligonucleotide
  siRNAs to PCSK9
  modified_base (1)..(1): 2'-hydroxy corresponding base
  modified_base (2)..(2): 2'-hydroxy corresponding base
  modified_base (3)..(3): 2'-hydroxy corresponding base
  modified_base (4)..(4): 2'-hydroxy corresponding base
  modified_base (5)..(5): 2'-hydroxy corresponding base
  modified_base (6)..(6): 2'-hydroxy corresponding base
  modified_base (7)..(7): 2'-hydroxy corresponding base
  modified_base (8)..(8): 2'-hydroxy corresponding base
  modified_base (9)..(9): 2'-hydroxy corresponding base
  modified_base (10)..(10): 2'-hydroxy corresponding base
  modified_base (11)..(11): 2'-hydroxy corresponding base
  modified_base (12)..(12): 2'-hydroxy corresponding base
  modified_base (13)..(13): 2'-hydroxy corresponding base
  modified_base (14)..(14): 2'-hydroxy corresponding base
  modified_base (15)..(15): 2'-hydroxy corresponding base
  modified_base (16)..(16): 2'-hydroxy corresponding base
  modified_base (17)..(17): 2'-hydroxy corresponding base
  modified_base (18)..(18): 2'-hydroxy corresponding base
  modified_base (19)..(19): 2'-hydroxy corresponding base
  modified_base (20)..(20): deoxythymidine
  modified_base (21)..(21): 5'-thio thymidine
ccgcugccggcaacuuccgtt

SEQ ID NO: 520 - DNA, 21 bp, Artificial Sequence
  Description of Artificial Sequence: Synthetic oligonucleotide
  Description of Combined DNA/RNA Molecule: Synthetic oligonucleotide
  siRNAs to PCSK9
  modified_base (1)..(1): 2'-hydroxy corresponding base
  modified_base (2)..(2): 2'-hydroxy corresponding base
  modified_base (3)..(3): 2'-hydroxy corresponding base
  modified_base (4)..(4): 2'-hydroxy corresponding base
  modified_base (5)..(5): 2'-hydroxy corresponding base
  modified_base (6)..(6): 2'-hydroxy corresponding base
  modified_base (7)..(7): 2'-hydroxy corresponding base
  modified_base (8)..(8): 2'-hydroxy corresponding base
  modified_base (9)..(9): 2'-hydroxy corresponding base
  modified_base (10)..(10): 2'-hydroxy corresponding base
  modified_base (11)..(11): 2'-hydroxy corresponding base
  modified_base (12)..(12): 2'-hydroxy corresponding base
  modified_base (13)..(13): 2'-hydroxy corresponding base
  modified_base (14)..(14): 2'-hydroxy corresponding base
  modified_base (15)..(15): 2'-hydroxy corresponding base
  modified_base (16)..(16): 2'-hydroxy corresponding base
  modified_base (17)..(17): 2'-hydroxy corresponding base
  modified_base (18)..(18): 2'-hydroxy corresponding base
  modified_base (19)..(19): 2'-hydroxy corresponding base
  modified_base (20)..(20): deoxythymidine
  modified_base (21)..(21): 5'-thio thymidine
cggaaguugccggcagcggtt

SEQ ID NO: 521 - DNA, 21 bp, Artificial Sequence
  Description of Artificial Sequence: Synthetic oligonucleotide
  Description of Combined DNA/RNA Molecule: Synthetic oligonucleotide
  siRNAs to PCSK9
  modified_base (1)..(1): 2'-O-methyl corresponding base
  modified_base (2)..(2): 2'-O-methyl corresponding base
  modified_base (3)..(3): 2'-hydroxy corresponding base
  modified_base (4)..(4): 2'-O-methyl corresponding base
  modified_base (5)..(5): 2'-O-methyl corresponding base
  modified_base (6)..(6): 2'-hydroxy corresponding base
  modified_base (7)..(7): 2'-O-methyl corresponding base
  modified_base (8)..(8): 2'-O-methyl corresponding base
  modified_base (9)..(9): 2'-hydroxy corresponding base
  modified_base (10)..(10): 2'-hydroxy corresponding base
  modified_base (11)..(11): 2'-O-methyl corresponding base
  modified_base (12)..(12): 2'-hydroxy corresponding base
  modified_base (13)..(13): 2'-hydroxy corresponding base
  modified_base (14)..(14): 2'-O-methyl corresponding base
  modified_base (15)..(15): 2'-O-methyl corresponding base
  modified_base (16)..(16): 2'-O-methyl corresponding base
  modified_base (17)..(17): 2'-O-methyl corresponding base
  modified_base (18)..(18): 2'-O-methyl corresponding base
  modified_base (19)..(19): 2'-hydroxy corresponding base
  modified_base (20)..(20): deoxythymidine
  modified_base (21)..(21): 5'-thio thymidine
ccgcugccggcaacuuccgtt

SEQ ID NO: 522 - DNA, 21 bp, Artificial Sequence
  Description of Artificial Sequence: Synthetic oligonucleotide
  Description of Combined DNA/RNA Molecule: Synthetic oligonucleotide
  siRNAs to PCSK9
  modified_base (1)..(1): 2'-hydroxy corresponding base
  modified_base (2)..(2): 2'-hydroxy corresponding base
  modified_base (3)..(3): 2'-hydroxy corresponding base
  modified_base (4)..(4): 2'-hydroxy corresponding base
  modified_base (5)..(5): 2'-hydroxy corresponding base
  modified_base (6)..(6): 2'-hydroxy corresponding base
  modified_base (7)..(7): 2'-hydroxy corresponding base
  modified_base (8)..(8): 2'-hydroxy corresponding base
  modified_base (9)..(9): 2'-hydroxy corresponding base
  modified_base (10)..(10): 2'-hydroxy corresponding base
  modified_base (11)..(11): 2'-hydroxy corresponding base
  modified_base (12)..(12): 2'-hydroxy corresponding base
  modified_base (13)..(13): 2'-hydroxy corresponding base
  modified_base (14)..(14): 2'-O-methyl corresponding base
  modified_base (15)..(15): 2'-hydroxy corresponding base
  modified_base (16)..(16): 2'-hydroxy corresponding base
  modified_base (17)..(17): 2'-hydroxy corresponding base
  modified_base (18)..(18): 2'-hydroxy corresponding base
  modified_base (19)..(19): 2'-hydroxy corresponding base
  modified_base (20)..(20): deoxythymidine
  modified_base (21)..(21): 5'-thio thymidine
cggaaguugccggcagcggtt

SEQ ID NO: 523 - DNA, 21 bp, Artificial Sequence
  Description of Artificial Sequence: Synthetic oligonucleotide
  Description of Combined DNA/RNA Molecule: Synthetic oligonucleotide
  siRNAs to PCSK9
  modified_base (1)..(1): 2'-hydroxy corresponding base
  modified_base (2)..(2): 2'-hydroxy corresponding base
  modified_base (3)..(3): 2'-hydroxy corresponding base
  modified_base (4)..(4): 2'-hydroxy corresponding base
  modified_base (5)..(5): 2'-hydroxy corresponding base
  modified_base (6)..(6): 2'-hydroxy corresponding base
  modified_base (7)..(7): 2'-hydroxy corresponding base
  modified_base (8)..(8): 2'-hydroxy corresponding base
  modified_base (9)..(9): 2'-hydroxy corresponding base
  modified_base (10)..(10): 2'-hydroxy corresponding base
  modified_base (11)..(11): 2'-hydroxy corresponding base
  modified_base (12)..(12): 2'-hydroxy corresponding base
  modified_base (13)..(13): 2'-hydroxy corresponding base
  modified_base (14)..(14): 2'-hydroxy corresponding base
  modified_base (15)..(15): 2'-hydroxy corresponding base
  modified_base (16)..(16): 2'-hydroxy corresponding base
  modified_base (17)..(17): 2'-hydroxy corresponding base
  modified_base (18)..(18): 2'-hydroxy corresponding base
  modified_base (19)..(19): 2'-hydroxy corresponding base
  modified_base (20)..(20): deoxythymidine
  modified_base (21)..(21): 5'-thio thymidine
cgcugccggcaacuuccggtt

SEQ ID NO: 524 - DNA, 21 bp, Artificial Sequence
  Description of Artificial Sequence: Synthetic oligonucleotide
  Description of Combined DNA/RNA Molecule: Synthetic oligonucleotide
  siRNAs to PCSK9
  modified_base (1)..(1): 2'-hydroxy corresponding base
  modified_base (2)..(2): 2'-hydroxy corresponding base
  modified_base (3)..(3): 2'-hydroxy corresponding base
  modified_base (4)..(4): 2'-hydroxy corresponding base
  modified_base (5)..(5): 2'-hydroxy corresponding base
  modified_base (6)..(6): 2'-hydroxy corresponding base
  modified_base (7)..(7): 2'-hydroxy corresponding base
  modified_base (8)..(8): 2'-hydroxy corresponding base
  modified_base (9)..(9): 2'-hydroxy corresponding base
  modified_base (10)..(10): 2'-hydroxy corresponding base
  modified_base (11)..(11): 2'-hydroxy corresponding base
  modified_base (12)..(12): 2'-hydroxy corresponding base
  modified_base (13)..(13): 2'-hydroxy corresponding base
  modified_base (14)..(14): 2'-hydroxy corresponding base
  modified_base (15)..(15): 2'-hydroxy corresponding base
  modified_base (16)..(16): 2'-hydroxy corresponding base
  modified_base (17)..(17): 2'-hydroxy corresponding base
  modified_base (18)..(18): 2'-hydroxy corresponding base
  modified_base (19)..(19): 2'-hydroxy corresponding base
  modified_base (20)..(20): deoxythymidine
  modified_base (21)..(21): 5'-thio thymidine
ccggaaguugccggcagcgtt

SEQ ID NO: 525 - DNA, 21 bp, Artificial Sequence
  Description of Artificial Sequence: Synthetic oligonucleotide
  Description of Combined DNA/RNA Molecule: Synthetic oligonucleotide
  siRNAs to PCSK9
  modified_base (1)..(1): 2'-O-methyl corresponding base
  modified_base (2)..(2): 2'-hydroxy corresponding base
  modified_base (3)..(3): 2'-O-methyl corresponding base
  modified_base (4)..(4): 2'-O-methyl corresponding base
  modified_base (5)..(5): 2'-hydroxy corresponding base
  modified_base (6)..(6): 2'-O-methyl corresponding base
  modified_base (7)..(7): 2'-O-methyl corresponding base
  modified_base (8)..(8): 2'-hydroxy corresponding base
  modified_base (9)..(9): 2'-hydroxy corresponding base
  modified_base (10)..(10): 2'-O-methyl corresponding base
  modified_base (11)..(11): 2'-hydroxy corresponding base
  modified_base (12)..(12): 2'-hydroxy corresponding base
  modified_base (13)..(13): 2'-O-methyl corresponding base
  modified_base (14)..(14): 2'-O-methyl corresponding base
  modified_base (15)..(15): 2'-O-methyl corresponding base
  modified_base (16)..(16): 2'-O-methyl corresponding base
  modified_base (17)..(17): 2'-O-methyl corresponding base
  modified_base (18)..(18): 2'-hydroxy corresponding base
  modified_base (19)..(19): 2'-hydroxy corresponding base
  modified_base (20)..(20): deoxythymidine
  modified_base (21)..(21): 5'-thio thymidine
cgcugccggcaacuuccggtt

SEQ ID NO: 526 - DNA, 21 bp, Artificial Sequence
  Description of Artificial Sequence: Synthetic oligonucleotide
  Description of Combined DNA/RNA Molecule: Synthetic oligonucleotide
  siRNAs to PCSK9
  modified_base (1)..(1): 2'-hydroxy corresponding base
  modified_base (2)..(2): 2'-hydroxy corresponding base
  modified_base (3)..(3): 2'-hydroxy corresponding base
  modified_base (4)..(4): 2'-hydroxy corresponding base
  modified_base (5)..(5): 2'-hydroxy corresponding base
  modified_base (6)..(6): 2'-hydroxy corresponding base
  modified_base (7)..(7): 2'-hydroxy corresponding base
  modified_base (8)..(8): 2'-hydroxy corresponding base
  modified_base (9)..(9): 2'-hydroxy corresponding base
  modified_base (10)..(10): 2'-hydroxy corresponding base
  modified_base (11)..(11): 2'-hydroxy corresponding base
  modified_base (12)..(12): 2'-hydroxy corresponding base
  modified_base (13)..(13): 2'-hydroxy corresponding base
  modified_base (14)..(14): 2'-hydroxy corresponding base
  modified_base (15)..(15): 2'-O-methyl corresponding base
  modified_base (16)..(16): 2'-hydroxy corresponding base
  modified_base (17)..(17): 2'-hydroxy corresponding base
  modified_base (18)..(18): 2'-hydroxy corresponding base
  modified_base (19)..(19): 2'-hydroxy corresponding base
  modified_base (20)..(20): deoxythymidine
  modified_base (21)..(21): 5'-thio thymidine
ccggaaguugccggcagcgtt

SEQ ID NO: 527 - DNA, 21 bp, Artificial Sequence
  Description of Artificial Sequence: Synthetic oligonucleotide
  Description of Combined DNA/RNA Molecule: Synthetic oligonucleotide
  siRNAs to PCSK9
  modified_base (1)..(1): 2'-hydroxy corresponding base
  modified_base (2)..(2): 2'-hydroxy corresponding base
  modified_base (3)..(3): 2'-hydroxy corresponding base
  modified_base (4)..(4): 2'-hydroxy corresponding base
  modified_base (5)..(5): 2'-hydroxy corresponding base
  modified_base (6)..(6): 2'-hydroxy corresponding base
  modified_base (7)..(7): 2'-hydroxy corresponding base
  modified_base (8)..(8): 2'-hydroxy corresponding base
  modified_base (9)..(9): 2'-hydroxy corresponding base
  modified_base (10)..(10): 2'-hydroxy corresponding base
  modified_base (11)..(11): 2'-hydroxy corresponding base
  modified_base (12)..(12): 2'-hydroxy corresponding base
  modified_base (13)..(13): 2'-hydroxy corresponding base
  modified_base (14)..(14): 2'-hydroxy corresponding base
  modified_base (15)..(15): 2'-hydroxy corresponding base
  modified_base (16)..(16): 2'-hydroxy corresponding base
  modified_base (17)..(17): 2'-hydroxy corresponding base
  modified_base (18)..(18): 2'-hydroxy corresponding base
  modified_base (19)..(19): 2'-hydroxy corresponding base
  modified_base (20)..(20): deoxythymidine
  modified_base (21)..(21): 5'-thio thymidine
gcugccggcaacuuccgggtt

SEQ ID NO: 528 - DNA, 21 bp, Artificial Sequence
  Description of Artificial Sequence: Synthetic oligonucleotide
  Description of Combined DNA/RNA Molecule: Synthetic oligonucleotide
  siRNAs to PCSK9
  modified_base (1)..(1): 2'-hydroxy corresponding base
  modified_base (2)..(2): 2'-hydroxy corresponding base
  modified_base (3)..(3): 2'-hydroxy corresponding base
  modified_base (4)..(4): 2'-hydroxy corresponding base
  modified_base (5)..(5): 2'-hydroxy corresponding base
  modified_base (6)..(6): 2'-hydroxy corresponding base
  modified_base (7)..(7): 2'-hydroxy corresponding base
  modified_base (8)..(8): 2'-hydroxy corresponding base
  modified_base (9)..(9): 2'-hydroxy corresponding base
  modified_base (10)..(10): 2'-hydroxy corresponding base
  modified_base (11)..(11): 2'-hydroxy corresponding base
  modified_base (12)..(12): 2'-hydroxy corresponding base
  modified_base (13)..(13): 2'-hydroxy corresponding base
  modified_base (14)..(14): 2'-hydroxy corresponding base
  modified_base (15)..(15): 2'-hydroxy corresponding base
  modified_base (16)..(16): 2'-hydroxy corresponding base
  modified_base (17)..(17): 2'-hydroxy corresponding base
  modified_base (18)..(18): 2'-hydroxy corresponding base
  modified_base (19)..(19): 2'-hydroxy corresponding base
  modified_base (20)..(20): deoxythymidine
  modified_base (21)..(21): 5'-thio thymidine
cccggaaguugccggcagctt

SEQ ID NO: 529 - DNA, 21 bp, Artificial Sequence
  Description of Artificial Sequence: Synthetic oligonucleotide
  Description of Combined DNA/RNA Molecule: Synthetic oligonucleotide
  siRNAs to PCSK9
  modified_base (1)..(1): 2'-hydroxy corresponding base
  modified_base (2)..(2): 2'-O-methyl corresponding base
  modified_base (3)..(3): 2'-O-methyl corresponding base
  modified_base (4)..(4): 2'-hydroxy corresponding base
  modified_base (5)..(5): 2'-O-methyl corresponding base
  modified_base (6)..(6): 2'-O-methyl corresponding base
  modified_base (7)..(7): 2'-hydroxy corresponding base
  modified_base (8)..(8): 2'-hydroxy corresponding base
  modified_base (9)..(9): 2'-O-methyl corresponding base
  modified_base (10)..(10): 2'-hydroxy corresponding base
  modified_base (11)..(11): 2'-hydroxy corresponding base
  modified_base (12)..(12): 2'-O-methyl corresponding base
  modified_base (13)..(13): 2'-O-methyl corresponding base
  modified_base (14)..(14): 2'-O-methyl corresponding base
  modified_base (15)..(15): 2'-O-methyl corresponding base
  modified_base (16)..(16): 2'-O-methyl corresponding base
  modified_base (17)..(17): 2'-hydroxy corresponding base
  modified_base (18)..(18): 2'-hydroxy corresponding base
  modified_base (19)..(19): 2'-hydroxy corresponding base
  modified_base (20)..(20): deoxythymidine
  modified_base (21)..(21): 5'-thio thymidine
gcugccggcaacuuccgggtt

SEQ ID NO: 530 - DNA, 21 bp, Artificial Sequence
  Description of Artificial Sequence: Synthetic oligonucleotide
  Description of Combined DNA/RNA Molecule: Synthetic oligonucleotide
  siRNAs to PCSK9
  modified_base (1)..(1): 2'-hydroxy corresponding base
  modified_base (2)..(2): 2'-hydroxy corresponding base
  modified_base (3)..(3): 2'-hydroxy corresponding base
  modified_base (4)..(4): 2'-hydroxy corresponding base
  modified_base (5)..(5): 2'-hydroxy corresponding base
  modified_base (6)..(6): 2'-hydroxy corresponding base
  modified_base (7)..(7): 2'-hydroxy corresponding base
  modified_base (8)..(8): 2'-hydroxy corresponding base
  modified_base (9)..(9): 2'-hydroxy corresponding base
  modified_base (10)..(10): 2'-hydroxy corresponding base
  modified_base (11)..(11): 2'-hydroxy corresponding base
  modified_base (12)..(12): 2'-hydroxy corresponding base
  modified_base (13)..(13): 2'-hydroxy corresponding base
  modified_base (14)..(14): 2'-hydroxy corresponding base
  modified_base (15)..(15): 2'-hydroxy corresponding base
  modified_base (16)..(16): 2'-O-methyl corresponding base
  modified_base (17)..(17): 2'-hydroxy corresponding base
  modified_base (18)..(18): 2'-hydroxy corresponding base
  modified_base (19)..(19): 2'-hydroxy corresponding base
  modified_base (20)..(20): deoxythymidine
  modified_base (21)..(21): 5'-thio thymidine
cccggaaguugccggcagctt

SEQ ID NO: 531 - DNA, 21 bp, Artificial Sequence
  Description of Artificial Sequence: Synthetic oligonucleotide
  Description of Combined DNA/RNA Molecule: Synthetic oligonucleotide
  siRNAs to PCSK9
  modified_base (1)..(1): 2'-hydroxy corresponding base
  modified_base (2)..(2): 2'-hydroxy corresponding base
  modified_base (3)..(3): 2'-hydroxy corresponding base
  modified_base (4)..(4): 2'-hydroxy corresponding base
  modified_base (5)..(5): 2'-hydroxy corresponding base
  modified_base (6)..(6): 2'-hydroxy corresponding base
  modified_base (7)..(7): 2'-hydroxy corresponding base
  modified_base (8)..(8): 2'-hydroxy corresponding base
  modified_base (9)..(9): 2'-hydroxy corresponding base
  modified_base (10)..(10): 2'-hydroxy corresponding base
  modified_base (11)..(11): 2'-hydroxy corresponding base
  modified_base (12)..(12): 2'-hydroxy corresponding base
  modified_base (13)..(13): 2'-hydroxy corresponding base
  modified_base (14)..(14): 2'-hydroxy corresponding base
  modified_base (15)..(15): 2'-hydroxy corresponding base
  modified_base (16)..(16): 2'-hydroxy corresponding base
  modified_base (17)..(17): 2'-hydroxy corresponding base
  modified_base (18)..(18): 2'-hydroxy corresponding base
  modified_base (19)..(19): 2'-hydroxy corresponding base
  modified_base (20)..(20): deoxythymidine
  modified_base (21)..(21): 5'-thio thymidine
cggcaacuuccgggacgautt

SEQ ID NO: 532 - DNA, 21 bp, Artificial Sequence
  Description of Artificial Sequence: Synthetic oligonucleotide
  Description of Combined DNA/RNA Molecule: Synthetic oligonucleotide
  siRNAs to PCSK9
  modified_base (1)..(1): 2'-hydroxy corresponding base
  modified_base (2)..(2): 2'-hydroxy corresponding base
  modified_base (3)..(3): 2'-hydroxy corresponding base
  modified_base (4)..(4): 2'-hydroxy corresponding base
  modified_base (5)..(5): 2'-hydroxy corresponding base
  modified_base (6)..(6): 2'-hydroxy corresponding base
  modified_base (7)..(7): 2'-hydroxy corresponding base
  modified_base (8)..(8): 2'-hydroxy corresponding base
  modified_base (9)..(9): 2'-hydroxy corresponding base
  modified_base (10)..(10): 2'-hydroxy corresponding base
  modified_base (11)..(11): 2'-hydroxy corresponding base
  modified_base (12)..(12): 2'-hydroxy corresponding base
  modified_base (13)..(13): 2'-hydroxy corresponding base
  modified_base (14)..(14): 2'-hydroxy corresponding base
  modified_base (15)..(15): 2'-hydroxy corresponding base
  modified_base (16)..(16): 2'-hydroxy corresponding base
  modified_base (17)..(17): 2'-hydroxy corresponding base
  modified_base (18)..(18): 2'-hydroxy corresponding base
  modified_base (19)..(19): 2'-hydroxy corresponding base
  modified_base (20)..(20): deoxythymidine
  modified_base (21)..(21): 5'-thio thymidine
aucgucccggaaguugccgtt

SEQ ID NO: 533 - DNA, 21 bp, Artificial Sequence
  Description of Artificial Sequence: Synthetic oligonucleotide
  Description of Combined DNA/RNA Molecule: Synthetic oligonucleotide
  siRNAs to PCSK9
  modified_base (1)..(1): 2'-O-methyl corresponding base
  modified_base (2)..(2): 2'-hydroxy corresponding base
  modified_base (3)..(3): 2'-hydroxy corresponding base
  modified_base (4)..(4): 2'-O-methyl corresponding base
  modified_base (5)..(5): 2'-hydroxy corresponding base
  modified_base (6)..(6): 2'-hydroxy corresponding base
  modified_base (7)..(7): 2'-O-methyl corresponding base
  modified_base (8)..(8): 2'-O-methyl corresponding base
  modified_base (9)..(9): 2'-O-methyl corresponding base
  modified_base (10)..(10): 2'-O-methyl corresponding base
  modified_base (11)..(11): 2'-O-methyl corresponding base
  modified_base (12)..(12): 2'-hydroxy corresponding base
  modified_base (13)..(13): 2'-hydroxy corresponding base
  modified_base (14)..(14): 2'-hydroxy corresponding base
  modified_base (15)..(15): 2'-hydroxy corresponding base
  modified_base (16)..(16): 2'-O-methyl corresponding base
  modified_base (17)..(17): 2'-hydroxy corresponding base
  modified_base (18)..(18): 2'-hydroxy corresponding base
  modified_base (19)..(19): 2'-O-methyl corresponding base
  modified_base (20)..(20): deoxythymidine
  modified_base (21)..(21): 5'-thio thymidine
cggcaacuuccgggacgautt

SEQ ID NO: 534 - DNA, 21 bp, Artificial Sequence
  Description of Artificial Sequence: Synthetic oligonucleotide
  Description of Combined DNA/RNA Molecule: Synthetic oligonucleotide
  siRNAs to PCSK9
  modified_base (1)..(1): 2'-hydroxy corresponding base
  modified_base (2)..(2): 2'-hydroxy corresponding base
  modified_base (3)..(3): 2'-hydroxy corresponding base
  modified_base (4)..(4): 2'-hydroxy corresponding base
  modified_base (5)..(5): 2'-hydroxy corresponding base
  modified_base (6)..(6): 2'-hydroxy corresponding base
  modified_base (7)..(7): 2'-hydroxy corresponding base
  modified_base (8)..(8): 2'-hydroxy corresponding base
  modified_base (9)..(9): 2'-hydroxy corresponding base
  modified_base (10)..(10): 2'-hydroxy corresponding base
  modified_base (11)..(11): 2'-hydroxy corresponding base
  modified_base (12)..(12): 2'-hydroxy corresponding base
  modified_base (13)..(13): 2'-hydroxy corresponding base
  modified_base (14)..(14): 2'-hydroxy corresponding base
  modified_base (15)..(15): 2'-hydroxy corresponding base
  modified_base (16)..(16): 2'-hydroxy corresponding base
  modified_base (17)..(17): 2'-hydroxy corresponding base
  modified_base (18)..(18): 2'-hydroxy corresponding base
  modified_base (19)..(19): 2'-hydroxy corresponding base
  modified_base (20)..(20): deoxythymidine
  modified_base (21)..(21): 5'-thio thymidine
aucgucccggaaguugccgtt

SEQ ID NO: 535 - DNA, 21 bp, Artificial Sequence
  Description of Artificial Sequence: Synthetic oligonucleotide
  Description of Combined DNA/RNA Molecule: Synthetic oligonucleotide
  siRNAs to PCSK9
  modified_base (1)..(1): 2'-hydroxy corresponding base
  modified_base (2)..(2): 2'-hydroxy corresponding base
  modified_base (3)..(3): 2'-hydroxy corresponding base
  modified_base (4)..(4): 2'-hydroxy corresponding base
  modified_base (5)..(5): 2'-hydroxy corresponding base
  modified_base (6)..(6): 2'-hydroxy corresponding base
  modified_base (7)..(7): 2'-hydroxy corresponding base
  modified_base (8)..(8): 2'-hydroxy corresponding base
  modified_base (9)..(9): 2'-hydroxy corresponding base
  modified_base (10)..(10): 2'-hydroxy corresponding base
  modified_base (11)..(11): 2'-hydroxy corresponding base
  modified_base (12)..(12): 2'-hydroxy corresponding base
  modified_base (13)..(13): 2'-hydroxy corresponding base
  modified_base (14)..(14): 2'-hydroxy corresponding base
  modified_base (15)..(15): 2'-hydroxy corresponding base
  modified_base (16)..(16): 2'-hydroxy corresponding base
  modified_base (17)..(17): 2'-hydroxy corresponding base
  modified_base (18)..(18): 2'-hydroxy corresponding base
  modified_base (19)..(19): 2'-hydroxy corresponding base
  modified_base (20)..(20): deoxythymidine
  modified_base (21)..(21): 5'-thio thymidine
ggcaacuuccgggacgaugtt

SEQ ID NO: 536 - DNA, 21 bp, Artificial Sequence
  Description of Artificial Sequence: Synthetic oligonucleotide
  Description of Combined DNA/RNA Molecule: Synthetic oligonucleotide
  siRNAs to PCSK9
  modified_base (1)..(1): 2'-hydroxy corresponding base
  modified_base (2)..(2): 2'-hydroxy corresponding base
  modified_base (3)..(3): 2'-hydroxy corresponding base
  modified_base (4)..(4): 2'-hydroxy corresponding base
  modified_base (5)..(5): 2'-hydroxy corresponding base
  modified_base (6)..(6): 2'-hydroxy corresponding base
  modified_base (7)..(7): 2'-hydroxy corresponding base
  modified_base (8)..(8): 2'-hydroxy corresponding base
  modified_base (9)..(9): 2'-hydroxy corresponding base
  modified_base (10)..(10): 2'-hydroxy corresponding base
  modified_base (11)..(11): 2'-hydroxy corresponding base
  modified_base (12)..(12): 2'-hydroxy corresponding base
  modified_base (13)..(13): 2'-hydroxy corresponding base
  modified_base (14)..(14): 2'-hydroxy corresponding base
  modified_base (15)..(15): 2'-hydroxy corresponding base
  modified_base (16)..(16): 2'-hydroxy corresponding base
  modified_base (17)..(17): 2'-hydroxy corresponding base
  modified_base (18)..(18): 2'-hydroxy corresponding base
  modified_base (19)..(19): 2'-hydroxy corresponding base
  modified_base (20)..(20): deoxythymidine
  modified_base (21)..(21): 5'-thio thymidine
caucgucccggaaguugcctt

SEQ ID NO: 537 - DNA, 21 bp, Artificial Sequence
  Description of Artificial Sequence: Synthetic oligonucleotide
  Description of Combined DNA/RNA Molecule: Synthetic oligonucleotide
  siRNAs to PCSK9
  modified_base (1)..(1): 2'-hydroxy corresponding base
  modified_base (2)..(2): 2'-hydroxy corresponding base
  modified_base (3)..(3): 2'-O-methyl corresponding base
  modified_base (4)..(4): 2'-hydroxy corresponding base
  modified_base (5)..(5): 2'-hydroxy corresponding base
  modified_base (6)..(6): 2'-O-methyl corresponding base
  modified_base (7)..(7): 2'-O-methyl corresponding base
  modified_base (8)..(8): 2'-O-methyl corresponding base
  modified_base (9)..(9): 2'-O-methyl corresponding base
  modified_base (10)..(10): 2'-O-methyl corresponding base
  modified_base (11)..(11): 2'-hydroxy corresponding base
  modified_base (12)..(12): 2'-hydroxy corresponding base
  modified_base (13)..(13): 2'-hydroxy corresponding base
  modified_base (14)..(14): 2'-hydroxy corresponding base
  modified_base (15)..(15): 2'-O-methyl corresponding base
  modified_base (16)..(16): 2'-hydroxy corresponding base
  modified_base (17)..(17): 2'-hydroxy corresponding base
  modified_base (18)..(18): 2'-O-methyl corresponding base
  modified_base (19)..(19): 2'-hydroxy corresponding base
  modified_base (20)..(20): deoxythymidine
  modified_base (21)..(21): 5'-thio thymidine
ggcaacuuccgggacgaugtt

SEQ ID NO: 538 - DNA, 21 bp, Artificial Sequence
  Description of Artificial Sequence: Synthetic oligonucleotide
  Description of Combined DNA/RNA Molecule: Synthetic oligonucleotide
  siRNAs to PCSK9
  modified_base (1)..(1): 2'-O-methyl corresponding base
  modified_base (2)..(2): 2'-hydroxy corresponding base
  modified_base (3)..(3): 2'-hydroxy corresponding base
  modified_base (4)..(4): 2'-hydroxy corresponding base
  modified_base (5)..(5): 2'-hydroxy corresponding base
  modified_base (6)..(6): 2'-hydroxy corresponding base
  modified_base (7)..(7): 2'-hydroxy corresponding base
  modified_base (8)..(8): 2'-hydroxy corresponding base
  modified_base (9)..(9): 2'-hydroxy corresponding base
  modified_base (10)..(10): 2'-hydroxy corresponding base
  modified_base (11)..(11): 2'-hydroxy corresponding base
  modified_base (12)..(12): 2'-hydroxy corresponding base
  modified_base (13)..(13): 2'-hydroxy corresponding base
  modified_base (14)..(14): 2'-hydroxy corresponding base
  modified_base (15)..(15): 2'-hydroxy corresponding base
  modified_base (16)..(16): 2'-hydroxy corresponding base
  modified_base (17)..(17): 2'-hydroxy corresponding base
  modified_base (18)..(18): 2'-hydroxy corresponding base
  modified_base (19)..(19): 2'-hydroxy corresponding base
  modified_base (20)..(20): deoxythymidine
  modified_base (21)..(21): 5'-thio thymidine
caucgucccggaaguugcctt

SEQ ID NO: 539 - DNA, 21 bp, Artificial Sequence
  Description of Artificial Sequence: Synthetic oligonucleotide
  Description of Combined DNA/RNA Molecule: Synthetic oligonucleotide
  siRNAs to PCSK9
  modified_base (1)..(1): 2'-hydroxy corresponding base
  modified_base (2)..(2): 2'-hydroxy corresponding base
  modified_base (3)..(3): 2'-hydroxy corresponding base
  modified_base (4)..(4): 2'-hydroxy corresponding base
  modified_base (5)..(5): 2'-hydroxy corresponding base
  modified_base (6)..(6): 2'-hydroxy corresponding base
  modified_base (7)..(7): 2'-hydroxy corresponding base
  modified_base (8)..(8): 2'-hydroxy corresponding base
  modified_base (9)..(9): 2'-hydroxy corresponding base
  modified_base (10)..(10): 2'-hydroxy corresponding base
  modified_base (11)..(11): 2'-hydroxy corresponding base
  modified_base (12)..(12): 2'-hydroxy corresponding base
  modified_base (13)..(13): 2'-hydroxy corresponding base
  modified_base (14)..(14): 2'-hydroxy corresponding base
  modified_base (15)..(15): 2'-hydroxy corresponding base
  modified_base (16)..(16): 2'-hydroxy corresponding base
  modified_base (17)..(17): 2'-hydroxy corresponding base
  modified_base (18)..(18): 2'-hydroxy corresponding base
  modified_base (19)..(19): 2'-hydroxy corresponding base
  modified_base (20)..(20): deoxythymidine
  modified_base (21)..(21): 5'-thio thymidine
uuccgggacgaugccugcctt

SEQ ID NO: 540 - DNA, 21 bp, Artificial Sequence
  Description of Artificial Sequence: Synthetic oligonucleotide
  Description of Combined DNA/RNA Molecule: Synthetic oligonucleotide
  siRNAs to PCSK9
  modified_base (1)..(1): 2'-hydroxy corresponding base
  modified_base (2)..(2): 2'-hydroxy corresponding base
  modified_base (3)..(3): 2'-hydroxy corresponding base
  modified_base (4)..(4): 2'-hydroxy corresponding base
  modified_base (5)..(5): 2'-hydroxy corresponding base
  modified_base (6)..(6): 2'-hydroxy corresponding base
  modified_base (7)..(7): 2'-hydroxy corresponding base
  modified_base (8)..(8): 2'-hydroxy corresponding base
  modified_base (9)..(9): 2'-hydroxy corresponding base
  modified_base (10)..(10): 2'-hydroxy corresponding base
  modified_base (11)..(11): 2'-hydroxy corresponding base
  modified_base (12)..(12): 2'-hydroxy corresponding base
  modified_base (13)..(13): 2'-hydroxy corresponding base
  modified_base (14)..(14): 2'-hydroxy corresponding base
  modified_base (15)..(15): 2'-hydroxy corresponding base
  modified_base (16)..(16): 2'-hydroxy corresponding base
  modified_base (17)..(17): 2'-hydroxy corresponding base
  modified_base (18)..(18): 2'-hydroxy corresponding base
  modified_base (19)..(19): 2'-hydroxy corresponding base
  modified_base (20)..(20): deoxythymidine
  modified_base (21)..(21): 5'-thio thymidine
ggcaggcaucgucccggaatt

SEQ ID NO: 541 - DNA, 21 bp, Artificial Sequence
  Description of Artificial Sequence: Synthetic oligonucleotide
  Description of Combined DNA/RNA Molecule: Synthetic oligonucleotide
  siRNAs to PCSK9
  modified_base (1)..(1): 2'-O-methyl corresponding base
  modified_base (2)..(2): 2'-O-methyl corresponding base
  modified_base (3)..(3): 2'-O-methyl corresponding base
  modified_base (4)..(4): 2'-O-methyl corresponding base
  modified_base (5)..(5): 2'-hydroxy corresponding base
  modified_base (6)..(6): 2'-hydroxy corresponding base
  modified_base (7)..(7): 2'-hydroxy corresponding base
  modified_base (8)..(8): 2'-hydroxy corresponding base
  modified_base (9)..(9): 2'-O-methyl corresponding base
  modified_base (10)..(10): 2'-hydroxy corresponding base
  modified_base (11)..(11): 2'-hydroxy corresponding base
  modified_base (12)..(12): 2'-O-methyl corresponding base
  modified_base (13)..(13): 2'-hydroxy corresponding base
  modified_base (14)..(14): 2'-O-methyl corresponding base
  modified_base (15)..(15): 2'-O-methyl corresponding base
  modified_base (16)..(16): 2'-O-methyl corresponding base
  modified_base (17)..(17): 2'-hydroxy corresponding base
  modified_base (18)..(18): 2'-O-methyl corresponding base
  modified_base (19)..(19): 2'-O-methyl corresponding base
  modified_base (20)..(20): deoxythymidine
  modified_base (21)..(21): 5'-thio thymidine
uuccgggacgaugccugcctt

SEQ ID NO: 542 - DNA, 21 bp, Artificial Sequence
  Description of Artificial Sequence: Synthetic oligonucleotide
  Description of Combined DNA/RNA Molecule: Synthetic oligonucleotide
  siRNAs to PCSK9
  modified_base (1)..(1): 2'-hydroxy corresponding base
  modified_base (2)..(2): 2'-hydroxy corresponding base
  modified_base (3)..(3): 2'-O-methyl corresponding base
  modified_base (4)..(4): 2'-hydroxy corresponding base
  modified_base (5)..(5): 2'-hydroxy corresponding base
  modified_base (6)..(6): 2'-hydroxy corresponding base
  modified_base (7)..(7): 2'-O-methyl corresponding base
  modified_base (8)..(8): 2'-hydroxy corresponding base
  modified_base (9)..(9): 2'-hydroxy corresponding base
  modified_base (10)..(10): 2'-hydroxy corresponding base
  modified_base (11)..(11): 2'-hydroxy corresponding base
  modified_base (12)..(12): 2'-hydroxy corresponding base
  modified_base (13)..(13): 2'-hydroxy corresponding base
  modified_base (14)..(14): 2'-hydroxy corresponding base
  modified_base (15)..(15): 2'-hydroxy corresponding base
  modified_base (16)..(16): 2'-hydroxy corresponding base
  modified_base (17)..(17): 2'-hydroxy corresponding base
  modified_base (18)..(18): 2'-hydroxy corresponding base
  modified_base (19)..(19): 2'-hydroxy corresponding base
  modified_base (20)..(20): deoxythymidine
  modified_base (21)..(21): 5'-thio thymidine
ggcaggcaucgucccggaatt

SEQ ID NO: 543 - DNA, 21 bp, Artificial Sequence
  Description of Artificial Sequence: Synthetic oligonucleotide
  Description of Combined DNA/RNA Molecule: Synthetic oligonucleotide
  siRNAs to PCSK9
  modified_base (1)..(1): 2'-hydroxy corresponding base
  modified_base (2)..(2): 2'-hydroxy corresponding base
  modified_base (3)..(3): 2'-hydroxy corresponding base
  modified_base (4)..(4): 2'-hydroxy corresponding base
  modified_base (5)..(5): 2'-hydroxy corresponding base
  modified_base (6)..(6): 2'-hydroxy corresponding base
  modified_base (7)..(7): 2'-hydroxy corresponding base
  modified_base (8)..(8): 2'-hydroxy corresponding base
  modified_base (9)..(9): 2'-hydroxy corresponding base
  modified_base (10)..(10): 2'-hydroxy corresponding base
  modified_base (11)..(11): 2'-hydroxy corresponding base
  modified_base (12)..(12): 2'-hydroxy corresponding base
  modified_base (13)..(13): 2'-hydroxy corresponding base
  modified_base (14)..(14): 2'-hydroxy corresponding base
  modified_base (15)..(15): 2'-hydroxy corresponding base
  modified_base (16)..(16): 2'-hydroxy corresponding base
  modified_base (17)..(17): 2'-hydroxy corresponding base
  modified_base (18)..(18): 2'-hydroxy corresponding base
  modified_base (19)..(19): 2'-hydroxy corresponding base
  modified_base (20)..(20): deoxythymidine
  modified_base (21)..(21): 5'-thio thymidine
ggacgaugccugccucuactt

SEQ ID NO: 544 - DNA, 21 bp, Artificial Sequence
  Description of Artificial Sequence: Synthetic oligonucleotide
  Description of Combined DNA/RNA Molecule: Synthetic oligonucleotide
  siRNAs to PCSK9
  modified_base (1)..(1): 2'-hydroxy corresponding base
  modified_base (2)..(2): 2'-hydroxy corresponding base
  modified_base (3)..(3): 2'-hydroxy corresponding base
  modified_base (4)..(4): 2'-hydroxy corresponding base
  modified_base (5)..(5): 2'-hydroxy corresponding base
  modified_base (6)..(6): 2'-hydroxy corresponding base
  modified_base (7)..(7): 2'-hydroxy corresponding base
  modified_base (8)..(8): 2'-hydroxy corresponding base
  modified_base (9)..(9): 2'-hydroxy corresponding base
  modified_base (10)..(10): 2'-hydroxy corresponding base
  modified_base (11)..(11): 2'-hydroxy corresponding base
  modified_base (12)..(12): 2'-hydroxy corresponding base
  modified_base (13)..(13): 2'-hydroxy corresponding base
  modified_base (14)..(14): 2'-hydroxy corresponding base
  modified_base (15)..(15): 2'-hydroxy corresponding base
  modified_base (16)..(16): 2'-hydroxy corresponding base
  modified_base (17)..(17): 2'-hydroxy corresponding base
  modified_base (18)..(18): 2'-hydroxy corresponding base
  modified_base (19)..(19): 2'-hydroxy corresponding base
  modified_base (20)..(20): deoxythymidine
  modified_base (21)..(21): 5'-thio thymidine
guagaggcaggcaucgucctt

SEQ ID NO: 545 - DNA, 21 bp, Artificial Sequence
  Description of Artificial Sequence: Synthetic oligonucleotide
  Description of Combined DNA/RNA Molecule: Synthetic oligonucleotide
  siRNAs to PCSK9
  modified_base (1)..(1): 2'-hydroxy corresponding base
  modified_base (2)..(2): 2'-hydroxy corresponding base
  modified_base (3)..(3): 2'-hydroxy corresponding base
  modified_base (4)..(4): 2'-hydroxy corresponding base
  modified_base (5)..(5): 2'-hydroxy corresponding base
  modified_base (6)..(6): 2'-hydroxy corresponding base
  modified_base (7)..(7): 2'-hydroxy corresponding base
  modified_base (8)..(8): 2'-hydroxy corresponding base
  modified_base (9)..(9): 2'-hydroxy corresponding base
  modified_base (10)..(10): 2'-hydroxy corresponding base
  modified_base (11)..(11): 2'-hydroxy corresponding base
  modified_base (12)..(12): 2'-hydroxy corresponding base
  modified_base (13)..(13): 2'-hydroxy corresponding base
  modified_base (14)..(14): 2'-hydroxy corresponding base
  modified_base (15)..(15): 2'-hydroxy corresponding base
  modified_base (16)..(16): 2'-hydroxy corresponding base
  modified_base (17)..(17): 2'-hydroxy corresponding base
  modified_base (18)..(18): 2'-hydroxy corresponding base
  modified_base (19)..(19): 2'-hydroxy corresponding base
  modified_base (20)..(20): deoxythymidine
  modified_base (21)..(21): 5'-thio thymidine
ggacgaugccugccucuactt

SEQ ID NO: 546 - DNA, 21 bp, Artificial Sequence
  Description of Artificial Sequence: Synthetic oligonucleotide
  Description of Combined DNA/RNA Molecule: Synthetic oligonucleotide
  siRNAs to PCSK9
  modified_base (1)..(1): 2'-hydroxy corresponding base
  modified_base (2)..(2): 2'-hydroxy corresponding base
  modified_base (3)..(3): 2'-hydroxy corresponding base
  modified_base (4)..(4): 2'-hydroxy corresponding base
  modified_base (5)..(5): 2'-hydroxy corresponding base
  modified_base (6)..(6): 2'-hydroxy corresponding base
  modified_base (7)..(7): 2'-hydroxy corresponding base
  modified_base (8)..(8): 2'-hydroxy corresponding base
  modified_base (9)..(9): 2'-hydroxy corresponding base
  modified_base (10)..(10): 2'-hydroxy corresponding base
  modified_base (11)..(11): 2'-hydroxy corresponding base
  modified_base (12)..(12): 2'-hydroxy corresponding base
  modified_base (13)..(13): 2'-hydroxy corresponding base
  modified_base (14)..(14): 2'-hydroxy corresponding base
  modified_base (15)..(15): 2'-hydroxy corresponding base
  modified_base (16)..(16): 2'-hydroxy corresponding base
  modified_base (17)..(17): 2'-hydroxy corresponding base
  modified_base (18)..(18): 2'-hydroxy corresponding base
  modified_base (19)..(19): 2'-hydroxy corresponding base
  modified_base (20)..(20): deoxythymidine
  modified_base (21)..(21): 5'-thio thymidine
guagaggcaggcaucgucctt

SEQ ID NO: 547 - DNA, 21 bp, Artificial Sequence
  Description of Artificial Sequence: Synthetic oligonucleotide
  Description of Combined DNA/RNA Molecule: Synthetic oligonucleotide
  siRNAs to PCSK9
  modified_base (1)..(1): 2'-hydroxy corresponding base
  modified_base (2)..(2): 2'-hydroxy corresponding base
  modified_base (3)..(3): 2'-hydroxy corresponding base
  modified_base (4)..(4): 2'-O-methyl corresponding base
  modified_base (5)..(5): 2'-hydroxy corresponding base
  modified_base (6)..(6): 2'-hydroxy corresponding base
  modified_base (7)..(7): 2'-O-methyl corresponding base
  modified_base (8)..(8): 2'-hydroxy corresponding base
  modified_base (9)..(9): 2'-O-methyl corresponding base
  modified_base (10)..(10): 2'-O-methyl corresponding base
  modified_base (11)..(11): 2'-O-methyl corresponding base
  modified_base (12)..(12): 2'-hydroxy corresponding base
  modified_base (13)..(13): 2'-O-methyl corresponding base
  modified_base (14)..(14): 2'-O-methyl corresponding base
  modified_base (15)..(15): 2'-O-methyl corresponding base
  modified_base (16)..(16): 2'-O-methyl corresponding base
  modified_base (17)..(17): 2'-O-methyl corresponding base
  modified_base (18)..(18): 2'-hydroxy corresponding base
  modified_base (19)..(19): 2'-O-methyl corresponding base
  modified_base (20)..(20): deoxythymidine
  modified_base (21)..(21): 5'-thio thymidine
ggacgaugccugccucuactt

SEQ ID NO: 548 - DNA, 21 bp, Artificial Sequence
  Description of Artificial Sequence: Synthetic oligonucleotide
  Description of Combined DNA/RNA Molecule: Synthetic oligonucleotide
  siRNAs to PCSK9
  modified_base (1)..(1): 2'-hydroxy corresponding base
  modified_base (2)..(2): 2'-O-methyl corresponding base
  modified_base (3)..(3): 2'-hydroxy corresponding base
  modified_base (4)..(4): 2'-hydroxy corresponding base
  modified_base (5)..(5): 2'-hydroxy corresponding base
  modified_base (6)..(6): 2'-hydroxy corresponding base
  modified_base (7)..(7): 2'-hydroxy corresponding base
  modified_base (8)..(8): 2'-O-methyl corresponding base
  modified_base (9)..(9): 2'-hydroxy corresponding base
  modified_base (10)..(10): 2'-hydroxy corresponding base
  modified_base (11)..(11): 2'-hydroxy corresponding base
  modified_base (12)..(12): 2'-O-methyl corresponding base
  modified_base (13)..(13): 2'-hydroxy corresponding base
  modified_base (14)..(14): 2'-hydroxy corresponding base
  modified_base (15)..(15): 2'-hydroxy corresponding base
  modified_base (16)..(16): 2'-hydroxy corresponding base
  modified_base (17)..(17): 2'-hydroxy corresponding base
  modified_base (18)..(18): 2'-hydroxy corresponding base
  modified_base (19)..(19): 2'-hydroxy corresponding base
  modified_base (20)..(20): deoxythymidine
  modified_base (21)..(21): 5'-thio thymidine
guagaggcaggcaucgucctt

SEQ ID NO: 549 - DNA, 21 bp, Artificial Sequence
  Description of Artificial Sequence: Synthetic oligonucleotide
  Description of Combined DNA/RNA Molecule: Synthetic oligonucleotide
  siRNAs to PCSK9
  modified_base (1)..(1): 2'-hydroxy corresponding base
  modified_base (2)..(2): 2'-hydroxy corresponding base
  modified_base (3)..(3): 2'-hydroxy corresponding base
  modified_base (4)..(4): 2'-hydroxy corresponding base
  modified_base (5)..(5): 2'-hydroxy corresponding base
  modified_base (6)..(6): 2'-hydroxy corresponding base
  modified_base (7)..(7): 2'-hydroxy corresponding base
  modified_base (8)..(8): 2'-hydroxy corresponding base
  modified_base (9)..(9): 2'-hydroxy corresponding base
  modified_base (10)..(10): 2'-hydroxy corresponding base
  modified_base (11)..(11): 2'-hydroxy corresponding base
  modified_base (12)..(12): 2'-hydroxy corresponding base
  modified_base (13)..(13): 2'-hydroxy corresponding base
  modified_base (14)..(14): 2'-hydroxy corresponding base
  modified_base (15)..(15): 2'-hydroxy corresponding base
  modified_base (16)..(16): 2'-hydroxy corresponding base
  modified_base (17)..(17): 2'-hydroxy corresponding base
  modified_base (18)..(18): 2'-hydroxy corresponding base
  modified_base (19)..(19): 2'-hydroxy corresponding base
  modified_base (20)..(20): deoxythymidine
  modified_base (21)..(21): deoxythymidine
gcucccgaggucaucacagtt

SEQ ID NO: 550 - DNA, 21 bp, Artificial Sequence
  Description of Artificial Sequence: Synthetic oligonucleotide
  Description of Combined DNA/RNA Molecule: Synthetic oligonucleotide
  siRNAs to PCSK9
  modified_base (1)..(1): 2'-hydroxy corresponding base
  modified_base (2)..(2): 2'-hydroxy corresponding base
  modified_base (3)..(3): 2'-hydroxy corresponding base
  modified_base (4)..(4): 2'-hydroxy corresponding base
  modified_base (5)..(5): 2'-hydroxy corresponding base
  modified_base (6)..(6): 2'-hydroxy corresponding base
  modified_base (7)..(7): 2'-hydroxy corresponding base
  modified_base (8)..(8): 2'-hydroxy corresponding base
  modified_base (9)..(9): 2'-hydroxy corresponding base
  modified_base (10)..(10): 2'-hydroxy corresponding base
  modified_base (11)..(11): 2'-hydroxy corresponding base
  modified_base (12)..(12): 2'-hydroxy corresponding base
  modified_base (13)..(13): 2'-hydroxy corresponding base
  modified_base (14)..(14): 2'-hydroxy corresponding base
  modified_base (15)..(15): 2'-hydroxy corresponding base
  modified_base (16)..(16): 2'-hydroxy corresponding base
  modified_base (17)..(17): 2'-hydroxy corresponding base
  modified_base (18)..(18): 2'-hydroxy corresponding base
  modified_base (19)..(19): 2'-hydroxy corresponding base
  modified_base (20)..(20): deoxythymidine
  modified_base (21)..(21): deoxythymidine
cugugaugaccucgggagctt

SEQ ID NO: 551 - DNA, 21 bp, Artificial Sequence
  Description of Artificial Sequence: Synthetic oligonucleotide
  Description of Combined DNA/RNA Molecule: Synthetic oligonucleotide
  siRNAs to PCSK9
  modified_base (1)..(1): 2'-hydroxy corresponding base
  modified_base (2)..(2): 2'-hydroxy corresponding base
  modified_base (3)..(3): 2'-hydroxy corresponding base
  modified_base (4)..(4): 2'-hydroxy corresponding base
  modified_base (5)..(5): 2'-hydroxy corresponding base
  modified_base (6)..(6): 2'-hydroxy corresponding base
  modified_base (7)..(7): 2'-hydroxy corresponding base
  modified_base (8)..(8): 2'-hydroxy corresponding base
  modified_base (9)..(9): 2'-hydroxy corresponding base
  modified_base (10)..(10): 2'-hydroxy corresponding base
  modified_base (11)..(11): 2'-hydroxy corresponding base
  modified_base (12)..(12): 2'-hydroxy corresponding base
  modified_base (13)..(13): 2'-hydroxy corresponding base
  modified_base (14)..(14): 2'-hydroxy corresponding base
  modified_base (15)..(15): 2'-hydroxy corresponding base
  modified_base (16)..(16): 2'-hydroxy corresponding base
  modified_base (17)..(17): 2'-hydroxy corresponding base
  modified_base (18)..(18): 2'-hydroxy corresponding base
  modified_base (19)..(19): 2'-hydroxy corresponding base
  modified_base (20)..(20): deoxythymidine
  modified_base (21)..(21): deoxythymidine
cucccgaggucaucacagutt

SEQ ID NO: 552 - DNA, 21 bp, Artificial Sequence
  Description of Artificial Sequence: Synthetic oligonucleotide
  Description of Combined DNA/RNA Molecule: Synthetic oligonucleotide
  siRNAs to PCSK9
  modified_base (1)..(1): 2'-hydroxy corresponding base
  modified_base (2)..(2): 2'-hydroxy corresponding base
  modified_base (3)..(3): 2'-hydroxy corresponding base
  modified_base (4)..(4): 2'-hydroxy corresponding base
  modified_base (5)..(5): 2'-hydroxy corresponding base
  modified_base (6)..(6): 2'-hydroxy corresponding base
  modified_base (7)..(7): 2'-hydroxy corresponding base
  modified_base (8)..(8): 2'-hydroxy corresponding base
  modified_base (9)..(9): 2'-hydroxy corresponding base
  modified_base (10)..(10): 2'-hydroxy corresponding base
  modified_base (11)..(11): 2'-hydroxy corresponding base
  modified_base (12)..(12): 2'-hydroxy corresponding base
  modified_base (13)..(13): 2'-hydroxy corresponding base
  modified_base (14)..(14): 2'-hydroxy corresponding base
  modified_base (15)..(15): 2'-hydroxy corresponding base
  modified_base (16)..(16): 2'-hydroxy corresponding base
  modified_base (17)..(17): 2'-hydroxy corresponding base
  modified_base (18)..(18): 2'-hydroxy corresponding base
  modified_base (19)..(19): 2'-hydroxy corresponding base
  modified_base (20)..(20): deoxythymidine
  modified_base (21)..(21): deoxythymidine
acugugaugaccucgggagtt

SEQ ID NO: 553 - DNA, 21 bp, Artificial Sequence
  Description of Artificial Sequence: Synthetic oligonucleotide
  Description of Combined DNA/RNA Molecule: Synthetic oligonucleotide
  siRNAs to PCSK9
  modified_base (1)..(1): 2'-hydroxy corresponding base
  modified_base (2)..(2): 2'-hydroxy corresponding base
  modified_base (3)..(3): 2'-hydroxy corresponding base
  modified_base (4)..(4): 2'-hydroxy corresponding base
  modified_base (5)..(5): 2'-hydroxy corresponding base
  modified_base (6)..(6): 2'-hydroxy corresponding base
  modified_base (7)..(7): 2'-hydroxy corresponding base
  modified_base (8)..(8): 2'-hydroxy corresponding base
  modified_base (9)..(9): 2'-hydroxy corresponding base
  modified_base (10)..(10): 2'-hydroxy corresponding base
  modified_base (11)..(11): 2'-hydroxy corresponding base
  modified_base (12)..(12): 2'-hydroxy corresponding base
  modified_base (13)..(13): 2'-hydroxy corresponding base
  modified_base (14)..(14): 2'-hydroxy corresponding base
  modified_base (15)..(15): 2'-hydroxy corresponding base
  modified_base (16)..(16): 2'-hydroxy corresponding base
  modified_base (17)..(17): 2'-hydroxy corresponding base
  modified_base (18)..(18): 2'-hydroxy corresponding base
  modified_base (19)..(19): 2'-hydroxy corresponding base
  modified_base (20)..(20): deoxythymidine
  modified_base (21)..(21): deoxythymidine
ucccgaggucaucacaguutt

SEQ ID NO: 554 - DNA, 21 bp, Artificial Sequence
  Description of Artificial Sequence: Synthetic oligonucleotide
  Description of Combined DNA/RNA Molecule: Synthetic oligonucleotide
  siRNAs to PCSK9
  modified_base (1)..(1): 2'-hydroxy corresponding base
  modified_base (2)..(2): 2'-hydroxy corresponding base
  modified_base (3)..(3): 2'-hydroxy corresponding base
  modified_base (4)..(4): 2'-hydroxy corresponding base
  modified_base (5)..(5): 2'-hydroxy corresponding base
  modified_base (6)..(6): 2'-hydroxy corresponding base
  modified_base (7)..(7): 2'-hydroxy corresponding base
  modified_base (8)..(8): 2'-hydroxy corresponding base
  modified_base (9)..(9): 2'-hydroxy corresponding base
  modified_base (10)..(10): 2'-hydroxy corresponding base
  modified_base (11)..(11): 2'-hydroxy corresponding base
  modified_base (12)..(12): 2'-hydroxy corresponding base
  modified_base (13)..(13): 2'-hydroxy corresponding base
  modified_base (14)..(14): 2'-hydroxy corresponding base
  modified_base (15)..(15): 2'-hydroxy corresponding base
  modified_base (16)..(16): 2'-hydroxy corresponding base
  modified_base (17)..(17): 2'-hydroxy corresponding base
  modified_base (18)..(18): 2'-hydroxy corresponding base
  modified_base (19)..(19): 2'-hydroxy corresponding base
  modified_base (20)..(20): deoxythymidine
  modified_base (21)..(21): deoxythymidine
aacugugaugaccucgggatt

SEQ ID NO: 555 - DNA, 21 bp, Artificial Sequence
  Description of Artificial Sequence: Synthetic oligonucleotide
  Description of Combined DNA/RNA Molecule: Synthetic oligonucleotide
  siRNAs to PCSK9
  modified_base (1)..(1): 2'-hydroxy corresponding base
  modified_base (2)..(2): 2'-hydroxy corresponding base
  modified_base (3)..(3): 2'-hydroxy corresponding base
  modified_base (4)..(4): 2'-hydroxy corresponding base
  modified_base (5)..(5): 2'-hydroxy corresponding base
  modified_base (6)..(6): 2'-hydroxy corresponding base
  modified_base (7)..(7): 2'-hydroxy corresponding base
  modified_base (8)..(8): 2'-hydroxy corresponding base
  modified_base (9)..(9): 2'-hydroxy corresponding base
  modified_base (10)..(10): 2'-hydroxy corresponding base
  modified_base (11)..(11): 2'-hydroxy corresponding base
  modified_base (12)..(12): 2'-hydroxy corresponding base
  modified_base (13)..(13): 2'-hydroxy corresponding base
  modified_base (14)..(14): 2'-hydroxy corresponding base
  modified_base (15)..(15): 2'-hydroxy corresponding base
  modified_base (16)..(16): 2'-hydroxy corresponding base
  modified_base (17)..(17): 2'-hydroxy corresponding base
  modified_base (18)..(18): 2'-hydroxy corresponding base
  modified_base (19)..(19): 2'-hydroxy corresponding base
  modified_base (20)..(20): deoxythymidine
  modified_base (21)..(21): deoxythymidine
ccaagaccagccggugacctt

SEQ ID NO: 556 - DNA, 21 bp, Artificial Sequence
  Description of Artificial Sequence: Synthetic oligonucleotide
  Description of Combined DNA/RNA Molecule: Synthetic oligonucleotide
  siRNAs to PCSK9
  modified_base (1)..(1): 2'-hydroxy corresponding base
  modified_base (2)..(2): 2'-hydroxy corresponding base
  modified_base (3)..(3): 2'-hydroxy corresponding base
  modified_base (4)..(4): 2'-hydroxy corresponding base
  modified_base (5)..(5): 2'-hydroxy corresponding base
  modified_base (6)..(6): 2'-hydroxy corresponding base
  modified_base (7)..(7): 2'-hydroxy corresponding base
  modified_base (8)..(8): 2'-hydroxy corresponding base
  modified_base (9)..(9): 2'-hydroxy corresponding base
  modified_base (10)..(10): 2'-hydroxy corresponding base
  modified_base (11)..(11): 2'-hydroxy corresponding base
  modified_base (12)..(12): 2'-hydroxy corresponding base
  modified_base (13)..(13): 2'-hydroxy corresponding base
  modified_base (14)..(14): 2'-hydroxy corresponding base
  modified_base (15)..(15): 2'-hydroxy corresponding base
  modified_base (16)..(16): 2'-hydroxy corresponding base
  modified_base (17)..(17): 2'-hydroxy corresponding base
  modified_base (18)..(18): 2'-hydroxy corresponding base
  modified_base (19)..(19): 2'-hydroxy corresponding base
  modified_base (20)..(20): deoxythymidine
  modified_base (21)..(21): deoxythymidine
ggucaccggcuggucuuggtt

SEQ ID NO: 557 - DNA, 21 bp, Artificial Sequence
  Description of Artificial Sequence: Synthetic oligonucleotide
  Description of Combined DNA/RNA Molecule: Synthetic oligonucleotide
  siRNAs to PCSK9
  modified_base (1)..(1): 2'-hydroxy corresponding base
  modified_base (2)..(2): 2'-hydroxy corresponding base
  modified_base (3)..(3): 2'-hydroxy corresponding base
  modified_base (4)..(4): 2'-hydroxy corresponding base
  modified_base (5)..(5): 2'-hydroxy corresponding base
  modified_base (6)..(6): 2'-hydroxy corresponding base
  modified_base (7)..(7): 2'-hydroxy corresponding base
  modified_base (8)..(8): 2'-hydroxy corresponding base
  modified_base (9)..(9): 2'-hydroxy corresponding base
  modified_base (10)..(10): 2'-hydroxy corresponding base
  modified_base (11)..(11): 2'-hydroxy corresponding base
  modified_base (12)..(12): 2'-hydroxy corresponding base
  modified_base (13)..(13): 2'-hydroxy corresponding base
  modified_base (14)..(14): 2'-hydroxy corresponding base
  modified_base (15)..(15): 2'-hydroxy corresponding base
  modified_base (16)..(16): 2'-hydroxy corresponding base
  modified_base (17)..(17): 2'-hydroxy corresponding base
  modified_base (18)..(18): 2'-hydroxy corresponding base
  modified_base (19)..(19): 2'-hydroxy corresponding base
  modified_base (20)..(20): deoxythymidine
  modified_base (21)..(21): deoxythymidine
caagaccagccggugaccctt

SEQ ID NO: 558 - DNA, 21 bp, Artificial Sequence
  Description of Artificial Sequence: Synthetic oligonucleotide
  Description of Combined DNA/RNA Molecule: Synthetic oligonucleotide
  siRNAs to PCSK9
  modified_base (1)..(1): 2'-hydroxy corresponding base
  modified_base (2)..(2): 2'-hydroxy corresponding base
  modified_base (3)..(3): 2'-hydroxy corresponding base
  modified_base (4)..(4): 2'-hydroxy corresponding base
  modified_base (5)..(5): 2'-hydroxy corresponding base
  modified_base (6)..(6): 2'-hydroxy corresponding base
  modified_base (7)..(7): 2'-hydroxy corresponding base
  modified_base (8)..(8): 2'-hydroxy corresponding base
  modified_base (9)..(9): 2'-hydroxy corresponding base
  modified_base (10)..(10): 2'-hydroxy corresponding base
  modified_base (11)..(11): 2'-hydroxy corresponding base
  modified_base (12)..(12): 2'-hydroxy corresponding base
  modified_base (13)..(13): 2'-hydroxy corresponding base
  modified_base (14)..(14): 2'-hydroxy corresponding base
  modified_base (15)..(15): 2'-hydroxy corresponding base
  modified_base (16)..(16): 2'-hydroxy corresponding base
  modified_base (17)..(17): 2'-hydroxy corresponding base
  modified_base (18)..(18): 2'-hydroxy corresponding base
  modified_base (19)..(19): 2'-hydroxy corresponding base
  modified_base (20)..(20): deoxythymidine
  modified_base (21)..(21): deoxythymidine
gggucaccggcuggucuugtt

SEQ ID NO: 559 - DNA, 21 bp, Artificial Sequence
  Description of Artificial Sequence: Synthetic oligonucleotide
  Description of Combined DNA/RNA Molecule: Synthetic oligonucleotide
  siRNAs to PCSK9
  modified_base (1)..(1): 2'-hydroxy corresponding base
  modified_base (2)..(2): 2'-hydroxy corresponding base
  modified_base (3)..(3): 2'-hydroxy corresponding base
  modified_base (4)..(4): 2'-hydroxy corresponding base
  modified_base (5)..(5): 2'-hydroxy corresponding base
  modified_base (6)..(6): 2'-hydroxy corresponding base
  modified_base (7)..(7): 2'-hydroxy corresponding base
  modified_base (8)..(8): 2'-hydroxy corresponding base
  modified_base (9)..(9): 2'-hydroxy corresponding base
  modified_base (10)..(10): 2'-hydroxy corresponding base
  modified_base (11)..(11): 2'-hydroxy corresponding base
  modified_base (12)..(12): 2'-hydroxy corresponding base
  modified_base (13)..(13): 2'-hydroxy corresponding base
  modified_base (14)..(14): 2'-hydroxy corresponding base
  modified_base (15)..(15): 2'-hydroxy corresponding base
  modified_base (16)..(16): 2'-hydroxy corresponding base
  modified_base (17)..(17): 2'-hydroxy corresponding base
  modified_base (18)..(18): 2'-hydroxy corresponding base
  modified_base (19)..(19): 2'-hydroxy corresponding base
  modified_base (20)..(20): deoxythymidine
  modified_base (21)..(21): 5'-thio thymidine
accaacuuuggccgcugugtt

SEQ ID NO: 560 - DNA, 21 bp, Artificial Sequence
  Description of Artificial Sequence: Synthetic oligonucleotide
  Description of Combined DNA/RNA Molecule: Synthetic oligonucleotide
  siRNAs to PCSK9
  modified_base (1)..(1): 2'-hydroxy corresponding base
  modified_base (2)..(2): 2'-hydroxy corresponding base
  modified_base (3)..(3): 2'-hydroxy corresponding base
  modified_base (4)..(4): 2'-hydroxy corresponding base
  modified_base (5)..(5): 2'-hydroxy corresponding base
  modified_base (6)..(6): 2'-hydroxy corresponding base
  modified_base (7)..(7): 2'-hydroxy corresponding base
  modified_base (8)..(8): 2'-hydroxy corresponding base
  modified_base (9)..(9): 2'-hydroxy corresponding base
  modified_base (10)..(10): 2'-hydroxy corresponding base
  modified_base (11)..(11): 2'-hydroxy corresponding base
  modified_base (12)..(12): 2'-hydroxy corresponding base
  modified_base (13)..(13): 2'-hydroxy corresponding base
  modified_base (14)..(14): 2'-hydroxy corresponding base
  modified_base (15)..(15): 2'-hydroxy corresponding base
  modified_base (16)..(16): 2'-hydroxy corresponding base
  modified_base (17)..(17): 2'-hydroxy corresponding base
  modified_base (18)..(18): 2'-hydroxy corresponding base
  modified_base (19)..(19): 2'-hydroxy corresponding base
  modified_base (20)..(20): deoxythymidine
  modified_base (21)..(21): 5'-thio thymidine
cacagcggccaaaguuggutt

SEQ ID NO: 561 - DNA, 21 bp, Artificial Sequence
  Description of Artificial Sequence: Synthetic oligonucleotide
  Description of Combined DNA/RNA Molecule: Synthetic oligonucleotide
  siRNAs to PCSK9
  modified_base (1)..(1): 2'-hydroxy corresponding base
  modified_base (2)..(2): 2'-O-methyl corresponding base
  modified_base (3)..(3): 2'-O-methyl corresponding base
  modified_base (4)..(4): 2'-hydroxy corresponding base
  modified_base (5)..(5): 2'-hydroxy corresponding base
  modified_base (6)..(6): 2'-O-methyl corresponding base
  modified_base (7)..(7): 2'-O-methyl corresponding base
  modified_base (8)..(8): 2'-O-methyl corresponding base
  modified_base (9)..(9): 2'-O-methyl corresponding base
  modified_base (10)..(10): 2'-hydroxy corresponding base
  modified_base (11)..(11): 2'-hydroxy corresponding base
  modified_base (12)..(12): 2'-O-methyl corresponding base
  modified_base (13)..(13): 2'-O-methyl corresponding base
  modified_base (14)..(14): 2'-hydroxy corresponding base
  modified_base (15)..(15): 2'-O-methyl corresponding base
  modified_base (16)..(16): 2'-O-methyl corresponding base
  modified_base (17)..(17): 2'-hydroxy corresponding base
  modified_base (18)..(18): 2'-O-methyl corresponding base
  modified_base (19)..(19): 2'-hydroxy corresponding base
  modified_base (20)..(20): deoxythymidine
  modified_base (21)..(21): 5'-thio thymidine
accaacuuuggccgcugugtt

SEQ ID NO: 562 - DNA, 21 bp, Artificial Sequence
  Description of Artificial Sequence: Synthetic oligonucleotide
  Description of Combined DNA/RNA Molecule: Synthetic oligonucleotide
  siRNAs to PCSK9
  modified_base (1)..(1): 2'-O-methyl corresponding base
  modified_base (2)..(2): 2'-hydroxy corresponding base
  modified_base (3)..(3): 2'-O-methyl corresponding base
  modified_base (4)..(4): 2'-hydroxy corresponding base
  modified_base (5)..(5): 2'-hydroxy corresponding base
  modified_base (6)..(6): 2'-hydroxy corresponding base
  modified_base (7)..(7): 2'-hydroxy corresponding base
  modified_base (8)..(8): 2'-hydroxy corresponding base
  modified_base (9)..(9): 2'-hydroxy corresponding base
  modified_base (10)..(10): 2'-O-methyl corresponding base
  modified_base (11)..(11): 2'-hydroxy corresponding base
  modified_base (12)..(12): 2'-hydroxy corresponding base
  modified_base (13)..(13): 2'-hydroxy corresponding base
  modified_base (14)..(14): 2'-hydroxy corresponding base
  modified_base (15)..(15): 2'-hydroxy corresponding base
  modified_base (16)..(16): 2'-hydroxy corresponding base
  modified_base (17)..(17): 2'-hydroxy corresponding base
  modified_base (18)..(18): 2'-hydroxy corresponding base
  modified_base (19)..(19): 2'-hydroxy corresponding base
  modified_base (20)..(20): deoxythymidine
  modified_base (21)..(21): 5'-thio thymidine
cacagcggccaaaguuggutt

SEQ ID NO: 563 - DNA, 21 bp, Artificial Sequence
  Description of Artificial Sequence: Synthetic oligonucleotide
  Description of Combined DNA/RNA Molecule: Synthetic oligonucleotide
  siRNAs to PCSK9
  modified_base (1)..(1): 2'-hydroxy corresponding base
  modified_base (2)..(2): 2'-hydroxy corresponding base
  modified_base (3)..(3): 2'-hydroxy corresponding base
  modified_base (4)..(4): 2'-hydroxy corresponding base
  modified_base (5)..(5): 2'-hydroxy corresponding base
  modified_base (6)..(6): 2'-hydroxy corresponding base
  modified_base (7)..(7): 2'-hydroxy corresponding base
  modified_base (8)..(8): 2'-hydroxy corresponding base
  modified_base (9)..(9): 2'-hydroxy corresponding base
  modified_base (10)..(10): 2'-hydroxy corresponding base
  modified_base (11)..(11): 2'-hydroxy corresponding base
  modified_base (12)..(12): 2'-hydroxy corresponding base
  modified_base (13)..(13): 2'-hydroxy corresponding base
  modified_base (14)..(14): 2'-hydroxy corresponding base
  modified_base (15)..(15): 2'-hydroxy corresponding base
  modified_base (16)..(16): 2'-hydroxy corresponding base
  modified_base (17)..(17): 2'-hydroxy corresponding base
  modified_base (18)..(18): 2'-hydroxy corresponding base
  modified_base (19)..(19): 2'-hydroxy corresponding base
  modified_base (20)..(20): deoxythymidine
  modified_base (21)..(21): 5'-thio thymidine
caacuuuggccgcugugugtt

SEQ ID NO: 564 - DNA, 21 bp, Artificial Sequence
  Description of Artificial Sequence: Synthetic oligonucleotide
  Description of Combined DNA/RNA Molecule: Synthetic oligonucleotide
  siRNAs to PCSK9
  modified_base (1)..(1): 2'-hydroxy corresponding base
  modified_base (2)..(2): 2'-hydroxy corresponding base
  modified_base (3)..(3): 2'-hydroxy corresponding base
  modified_base (4)..(4): 2'-hydroxy corresponding base
  modified_base (5)..(5): 2'-hydroxy corresponding base
  modified_base (6)..(6): 2'-hydroxy corresponding base
  modified_base (7)..(7): 2'-hydroxy corresponding base
  modified_base (8)..(8): 2'-hydroxy corresponding base
  modified_base (9)..(9): 2'-hydroxy corresponding base
  modified_base (10)..(10): 2'-hydroxy corresponding base
  modified_base (11)..(11): 2'-hydroxy corresponding base
  modified_base (12)..(12): 2'-hydroxy corresponding base
  modified_base (13)..(13): 2'-hydroxy corresponding base
  modified_base (14)..(14): 2'-hydroxy corresponding base
  modified_base (15)..(15): 2'-hydroxy corresponding base
  modified_base (16)..(16): 2'-hydroxy corresponding base
  modified_base (17)..(17): 2'-hydroxy corresponding base
  modified_base (18)..(18): 2'-hydroxy corresponding base
  modified_base (19)..(19): 2'-hydroxy corresponding base
  modified_base (20)..(20): deoxythymidine
  modified_base (21)..(21): 5'-thio thymidine
cacacagcggccaaaguugtt

SEQ ID NO: 565 - DNA, 21 bp, Artificial Sequence
  Description of Artificial Sequence: Synthetic oligonucleotide
  Description of Combined DNA/RNA Molecule: Synthetic oligonucleotide
  siRNAs to PCSK9
  modified_base (1)..(1): 2'-O-methyl corresponding base
  modified_base (2)..(2): 2'-hydroxy corresponding base
  modified_base (3)..(3): 2'-hydroxy corresponding base
  modified_base (4)..(4): 2'-O-methyl corresponding base
  modified_base (5)..(5): 2'-O-methyl corresponding base
  modified_base (6)..(6): 2'-O-methyl corresponding base
  modified_base (7)..(7): 2'-O-methyl corresponding base
  modified_base (8)..(8): 2'-hydroxy corresponding base
  modified_base (9)..(9): 2'-hydroxy corresponding base
  modified_base (10)..(10): 2'-O-methyl corresponding base
  modified_base (11)..(11): 2'-O-methyl corresponding base
  modified_base (12)..(12): 2'-hydroxy corresponding base
  modified_base (13)..(13): 2'-O-methyl corresponding base
  modified_base (14)..(14): 2'-O-methyl corresponding base
  modified_base (15)..(15): 2'-hydroxy corresponding base
  modified_base (16)..(16): 2'-O-methyl corresponding base
  modified_base (17)..(17): 2'-hydroxy corresponding base
  modified_base (18)..(18): 2'-O-methyl corresponding base
  modified_base (19)..(19): 2'-hydroxy corresponding base
  modified_base (20)..(20): deoxythymidine
  modified_base (21)..(21): 5'-thio thymidine
caacuuuggccgcugugugtt

SEQ ID NO: 566 - DNA, 21 bp, Artificial Sequence
  Description of Artificial Sequence: Synthetic oligonucleotide
  Description of Combined DNA/RNA Molecule: Synthetic oligonucleotide
  siRNAs to PCSK9
  modified_base (1)..(1): 2'-O-methyl corresponding base
  modified_base (2)..(2): 2'-hydroxy corresponding base
  modified_base (3)..(3): 2'-O-methyl corresponding base
  modified_base (4)..(4): 2'-hydroxy corresponding base
  modified_base (5)..(5): 2'-O-methyl corresponding base
  modified_base (6)..(6): 2'-hydroxy corresponding base
  modified_base (7)..(7): 2'-hydroxy corresponding base
  modified_base (8)..(8): 2'-hydroxy corresponding base
  modified_base (9)..(9): 2'-hydroxy corresponding base
  modified_base (10)..(10): 2'-hydroxy corresponding base
  modified_base (11)..(11): 2'-hydroxy corresponding base
  modified_base (12)..(12): 2'-O-methyl corresponding base
  modified_base (13)..(13): 2'-hydroxy corresponding base
  modified_base (14)..(14): 2'-hydroxy corresponding base
  modified_base (15)..(15): 2'-hydroxy corresponding base
  modified_base (16)..(16): 2'-hydroxy corresponding base
  modified_base (17)..(17): 2'-hydroxy corresponding base
  modified_base (18)..(18): 2'-hydroxy corresponding base
  modified_base (19)..(19): 2'-hydroxy corresponding base
  modified_base (20)..(20): deoxythymidine
  modified_base (21)..(21): 5'-thio thymidine
cacacagcggccaaaguugtt

SEQ ID NO: 567 - DNA, 21 bp, Artificial Sequence
  Description of Artificial Sequence: Synthetic oligonucleotide
  Description of Combined DNA/RNA Molecule: Synthetic oligonucleotide
  siRNAs to PCSK9
  modified_base (1)..(1): 2'-hydroxy corresponding base
  modified_base (2)..(2): 2'-hydroxy corresponding base
  modified_base (3)..(3): 2'-hydroxy corresponding base
  modified_base (4)..(4): 2'-hydroxy corresponding base
  modified_base (5)..(5): 2'-hydroxy corresponding base
  modified_base (6)..(6): 2'-hydroxy corresponding base
  modified_base (7)..(7): 2'-hydroxy corresponding base
  modified_base (8)..(8): 2'-hydroxy corresponding base
  modified_base (9)..(9): 2'-hydroxy corresponding base
  modified_base (10)..(10): 2'-hydroxy corresponding base
  modified_base (11)..(11): 2'-hydroxy corresponding base
  modified_base (12)..(12): 2'-hydroxy corresponding base
  modified_base (13)..(13): 2'-hydroxy corresponding base
  modified_base (14)..(14): 2'-hydroxy corresponding base
  modified_base (15)..(15): 2'-hydroxy corresponding base
  modified_base (16)..(16): 2'-hydroxy corresponding base
  modified_base (17)..(17): 2'-hydroxy corresponding base
  modified_base (18)..(18): 2'-hydroxy corresponding base
  modified_base (19)..(19): 2'-hydroxy corresponding base
  modified_base (20)..(20): deoxythymidine
  modified_base (21)..(21): 5'-thio thymidine
cgcuguguggaccucuuugtt

SEQ ID NO: 568 - DNA, 21 bp, Artificial Sequence
  Description of Artificial Sequence: Synthetic oligonucleotide
  Description of Combined DNA/RNA Molecule: Synthetic oligonucleotide
  siRNAs to PCSK9
  modified_base (1)..(1): 2'-hydroxy corresponding base
  modified_base (2)..(2): 2'-hydroxy corresponding base
  modified_base (3)..(3): 2'-hydroxy corresponding base
  modified_base (4)..(4): 2'-hydroxy corresponding base
  modified_base (5)..(5): 2'-hydroxy corresponding base
  modified_base (6)..(6): 2'-hydroxy corresponding base
  modified_base (7)..(7): 2'-hydroxy corresponding base
  modified_base (8)..(8): 2'-hydroxy corresponding base
  modified_base (9)..(9): 2'-hydroxy corresponding base
  modified_base (10)..(10): 2'-hydroxy corresponding base
  modified_base (11)..(11): 2'-hydroxy corresponding base
  modified_base (12)..(12): 2'-hydroxy corresponding base
  modified_base (13)..(13): 2'-hydroxy corresponding base
  modified_base (14)..(14): 2'-hydroxy corresponding base
  modified_base (15)..(15): 2'-hydroxy corresponding base
  modified_base (16)..(16): 2'-hydroxy corresponding base
  modified_base (17)..(17): 2'-hydroxy corresponding base
  modified_base (18)..(18): 2'-hydroxy corresponding base
  modified_base (19)..(19): 2'-hydroxy corresponding base
  modified_base (20)..(20): deoxythymidine
  modified_base (21)..(21): 5'-thio thymidine
caaagagguccacacagcgtt

SEQ ID NO: 569 - DNA, 21 bp, Artificial Sequence
  Description of Artificial Sequence: Synthetic oligonucleotide
  Description of Combined DNA/RNA Molecule: Synthetic oligonucleotide
  siRNAs to PCSK9
  modified_base (1)..(1): 2'-O-methyl corresponding base
  modified_base (2)..(2): 2'-hydroxy corresponding base
  modified_base (3)..(3): 2'-O-methyl corresponding base
  modified_base (4)..(4): 2'-O-methyl corresponding base
  modified_base (5)..(5): 2'-hydroxy corresponding base
  modified_base (6)..(6): 2'-O-methyl corresponding base
  modified_base (7)..(7): 2'-hydroxy corresponding base
  modified_base (8)..(8): 2'-O-methyl corresponding base
  modified_base (9)..(9): 2'-hydroxy corresponding base
  modified_base (10)..(10): 2'-hydroxy corresponding base
  modified_base (11)..(11): 2'-hydroxy corresponding base
  modified_base (12)..(12): 2'-O-methyl corresponding base
  modified_base (13)..(13): 2'-O-methyl corresponding base
  modified_base (14)..(14): 2'-O-methyl corresponding base
  modified_base (15)..(15): 2'-O-methyl corresponding base
  modified_base (16)..(16): 2'-O-methyl corresponding base
  modified_base (17)..(17): 2'-O-methyl corresponding base
  modified_base (18)..(18): 2'-O-methyl corresponding base
  modified_base (19)..(19): 2'-hydroxy corresponding base
  modified_base (20)..(20): deoxythymidine
  modified_base (21)..(21): 5'-thio thymidine
cgcuguguggaccucuuugtt

SEQ ID NO: 570 - DNA, 21 bp, Artificial Sequence
  Description of Artificial Sequence: Synthetic oligonucleotide
  Description of Combined DNA/RNA Molecule: Synthetic oligonucleotide
  siRNAs to PCSK9
  modified_base (1)..(1): 2'-O-methyl corresponding base
  modified_base (2)..(2): 2'-hydroxy corresponding base
  modified_base (3)..(3): 2'-hydroxy corresponding base
  modified_base (4)..(4): 2'-hydroxy corresponding base
  modified_base (5)..(5): 2'-hydroxy corresponding base
  modified_base (6)..(6): 2'-hydroxy corresponding base
  modified_base (7)..(7): 2'-hydroxy corresponding base
  modified_base (8)..(8): 2'-hydroxy corresponding base
  modified_base (9)..(9): 2'-hydroxy corresponding base
  modified_base (10)..(10): 2'-hydroxy corresponding base
  modified_base (11)..(11): 2'-O-methyl corresponding base
  modified_base (12)..(12): 2'-hydroxy corresponding base
  modified_base (13)..(13): 2'-O-methyl corresponding base
  modified_base (14)..(14): 2'-hydroxy corresponding base
  modified_base (15)..(15): 2'-O-methyl corresponding base
  modified_base (16)..(16): 2'-hydroxy corresponding base
  modified_base (17)..(17): 2'-hydroxy corresponding base
  modified_base (18)..(18): 2'-hydroxy corresponding base
  modified_base (19)..(19): 2'-hydroxy corresponding base
  modified_base (20)..(20): deoxythymidine
  modified_base (21)..(21): 5'-thio thymidine
caaagagguccacacagcgtt

SEQ ID NO: 571 - DNA, 21 bp, Artificial Sequence
  Description of Artificial Sequence: Synthetic oligonucleotide
  Description of Combined DNA/RNA Molecule: Synthetic oligonucleotide
  siRNAs to PCSK9
  modified_base (1)..(1): 2'-hydroxy corresponding base
  modified_base (2)..(2): 2'-hydroxy corresponding base
  modified_base (3)..(3): 2'-hydroxy corresponding base
  modified_base (4)..(4): 2'-hydroxy corresponding base
  modified_base (5)..(5): 2'-hydroxy corresponding base
  modified_base (6)..(6): 2'-hydroxy corresponding base
  modified_base (7)..(7): 2'-hydroxy corresponding base
  modified_base (8)..(8): 2'-hydroxy corresponding base
  modified_base (9)..(9): 2'-hydroxy corresponding base
  modified_base (10)..(10): 2'-hydroxy corresponding base
  modified_base (11)..(11): 2'-hydroxy corresponding base
  modified_base (12)..(12): 2'-hydroxy corresponding base
  modified_base (13)..(13): 2'-hydroxy corresponding base
  modified_base (14)..(14): 2'-hydroxy corresponding base
  modified_base (15)..(15): 2'-hydroxy corresponding base
  modified_base (16)..(16): 2'-hydroxy corresponding base
  modified_base (17)..(17): 2'-hydroxy corresponding base
  modified_base (18)..(18): 2'-hydroxy corresponding base
  modified_base (19)..(19): 2'-hydroxy corresponding base
  modified_base (20)..(20): deoxythymidine
  modified_base (21)..(21): 5'-thio thymidine
gacaucauuggugccuccatt

SEQ ID NO: 572 - DNA, 21 bp, Artificial Sequence
  Description of Artificial Sequence: Synthetic oligonucleotide
  Description of Combined DNA/RNA Molecule: Synthetic oligonucleotide
  siRNAs to PCSK9
  modified_base (1)..(1): 2'-hydroxy corresponding base
  modified_base (2)..(2): 2'-hydroxy corresponding base
  modified_base (3)..(3): 2'-hydroxy corresponding base
  modified_base (4)..(4): 2'-hydroxy corresponding base
  modified_base (5)..(5): 2'-hydroxy corresponding base
  modified_base (6)..(6): 2'-hydroxy corresponding base
  modified_base (7)..(7): 2'-hydroxy corresponding base
  modified_base (8)..(8): 2'-hydroxy corresponding base
  modified_base (9)..(9): 2'-hydroxy corresponding base
  modified_base (10)..(10): 2'-hydroxy corresponding base
  modified_base (11)..(11): 2'-hydroxy corresponding base
  modified_base (12)..(12): 2'-hydroxy corresponding base
  modified_base (13)..(13): 2'-hydroxy corresponding base
  modified_base (14)..(14): 2'-hydroxy corresponding base
  modified_base (15)..(15): 2'-hydroxy corresponding base
  modified_base (16)..(16): 2'-hydroxy corresponding base
  modified_base (17)..(17): 2'-hydroxy corresponding base
  modified_base (18)..(18): 2'-hydroxy corresponding base
  modified_base (19)..(19): 2'-hydroxy corresponding base
  modified_base (20)..(20): deoxythymidine
  modified_base (21)..(21): 5'-thio thymidine
uggaggcaccaaugauguctt

SEQ ID NO: 573 - DNA, 21 bp, Artificial Sequence
  Description of Artificial Sequence: Synthetic oligonucleotide
  Description of Combined DNA/RNA Molecule: Synthetic oligonucleotide
  siRNAs to PCSK9
  modified_base (1)..(1): 2'-hydroxy corresponding base
  modified_base (2)..(2): 2'-hydroxy corresponding base
  modified_base (3)..(3): 2'-O-methyl corresponding base
  modified_base (4)..(4): 2'-hydroxy corresponding base
  modified_base (5)..(5): 2'-O-methyl corresponding base
  modified_base (6)..(6): 2'-O-methyl corresponding base
  modified_base (7)..(7): 2'-hydroxy corresponding base
  modified_base (8)..(8): 2'-O-methyl corresponding base
  modified_base (9)..(9): 2'-O-methyl corresponding base
  modified_base (10)..(10): 2'-hydroxy corresponding base
  modified_base (11)..(11): 2'-hydroxy corresponding base
  modified_base (12)..(12): 2'-O-methyl corresponding base
  modified_base (13)..(13): 2'-hydroxy corresponding base
  modified_base (14)..(14): 2'-O-methyl corresponding base
  modified_base (15)..(15): 2'-O-methyl corresponding base
  modified_base (16)..(16): 2'-O-methyl corresponding base
  modified_base (17)..(17): 2'-O-methyl corresponding base
  modified_base (18)..(18): 2'-O-methyl corresponding base
  modified_base (19)..(19): 2'-hydroxy corresponding base
  modified_base (20)..(20): deoxythymidine
  modified_base (21)..(21): 5'-thio thymidine
gacaucauuggugccuccatt

SEQ ID NO: 574 - DNA, 21 bp, Artificial Sequence
  Description of Artificial Sequence: Synthetic oligonucleotide
  Description of Combined DNA/RNA Molecule: Synthetic oligonucleotide
  siRNAs to PCSK9
  modified_base (1)..(1): 2'-hydroxy corresponding base
  modified_base (2)..(2): 2'-hydroxy corresponding base
  modified_base (3)..(3): 2'-hydroxy corresponding base
  modified_base (4)..(4): 2'-hydroxy corresponding base
  modified_base (5)..(5): 2'-hydroxy corresponding base
  modified_base (6)..(6): 2'-hydroxy corresponding base
  modified_base (7)..(7): 2'-O-methyl corresponding base
  modified_base (8)..(8): 2'-hydroxy corresponding base
  modified_base (9)..(9): 2'-hydroxy corresponding base
  modified_base (10)..(10): 2'-O-methyl corresponding base
  modified_base (11)..(11): 2'-hydroxy corresponding base
  modified_base (12)..(12): 2'-hydroxy corresponding base
  modified_base (13)..(13): 2'-hydroxy corresponding base
  modified_base (14)..(14): 2'-hydroxy corresponding base
  modified_base (15)..(15): 2'-hydroxy corresponding base
  modified_base (16)..(16): 2'-hydroxy corresponding base
  modified_base (17)..(17): 2'-hydroxy corresponding base
  modified_base (18)..(18): 2'-hydroxy corresponding base
  modified_base (19)..(19): 2'-hydroxy corresponding base
  modified_base (20)..(20): deoxythymidine
  modified_base (21)..(21): 5'-thio thymidine
uggaggcaccaaugauguctt

SEQ ID NO: 575 - DNA, 21 bp, Artificial Sequence
  Description of Artificial Sequence: Synthetic oligonucleotide
  Description of Combined DNA/RNA Molecule: Synthetic oligonucleotide
  siRNAs to PCSK9
  modified_base (1)..(1): 2'-hydroxy corresponding base
  modified_base (2)..(2): 2'-hydroxy corresponding base
  modified_base (3)..(3): 2'-hydroxy corresponding base
  modified_base (4)..(4): 2'-hydroxy corresponding base
  modified_base (5)..(5): 2'-hydroxy corresponding base
  modified_base (6)..(6): 2'-hydroxy corresponding base
  modified_base (7)..(7): 2'-hydroxy corresponding base
  modified_base (8)..(8): 2'-hydroxy corresponding base
  modified_base (9)..(9): 2'-hydroxy corresponding base
  modified_base (10)..(10): 2'-hydroxy corresponding base
  modified_base (11)..(11): 2'-hydroxy corresponding base
  modified_base (12)..(12): 2'-hydroxy corresponding base
  modified_base (13)..(13): 2'-hydroxy corresponding base
  modified_base (14)..(14): 2'-hydroxy corresponding base
  modified_base (15)..(15): 2'-hydroxy corresponding base
  modified_base (16)..(16): 2'-hydroxy corresponding base
  modified_base (17)..(17): 2'-hydroxy corresponding base
  modified_base (18)..(18): 2'-hydroxy corresponding base
  modified_base (19)..(19): 2'-hydroxy corresponding base
  modified_base (20)..(20): deoxythymidine
  modified_base (21)..(21): 5'-thio thymidine
ucauuggugccuccagcgatt

SEQ ID NO: 576 - DNA, 21 bp, Artificial Sequence
  Description of Artificial Sequence: Synthetic oligonucleotide
  Description of Combined DNA/RNA Molecule: Synthetic oligonucleotide
  siRNAs to PCSK9
  modified_base (1)..(1): 2'-hydroxy corresponding base
  modified_base (2)..(2): 2'-hydroxy corresponding base
  modified_base (3)..(3): 2'-hydroxy corresponding base
  modified_base (4)..(4): 2'-hydroxy corresponding base
  modified_base (5)..(5): 2'-hydroxy corresponding base
  modified_base (6)..(6): 2'-hydroxy corresponding base
  modified_base (7)..(7): 2'-hydroxy corresponding base
  modified_base (8)..(8): 2'-hydroxy corresponding base
  modified_base (9)..(9): 2'-hydroxy corresponding base
  modified_base (10)..(10): 2'-hydroxy corresponding base
  modified_base (11)..(11): 2'-hydroxy corresponding base
  modified_base (12)..(12): 2'-hydroxy corresponding base
  modified_base (13)..(13): 2'-hydroxy corresponding base
  modified_base (14)..(14): 2'-hydroxy corresponding base
  modified_base (15)..(15): 2'-hydroxy corresponding base
  modified_base (16)..(16): 2'-hydroxy corresponding base
  modified_base (17)..(17): 2'-hydroxy corresponding base
  modified_base (18)..(18): 2'-hydroxy corresponding base
  modified_base (19)..(19): 2'-hydroxy corresponding base
  modified_base (20)..(20): deoxythymidine
  modified_base (21)..(21): 5'-thio thymidine
ucgcuggaggcaccaaugatt

SEQ ID NO: 577 - DNA, 21 bp, Artificial Sequence
  Description of Artificial Sequence: Synthetic oligonucleotide
  Description of Combined DNA/RNA Molecule: Synthetic oligonucleotide
  siRNAs to PCSK9
  modified_base (1)..(1): 2'-O-methyl corresponding base
  modified_base (2)..(2): 2'-O-methyl corresponding base
  modified_base (3)..(3): 2'-hydroxy corresponding base
  modified_base (4)..(4): 2'-O-methyl corresponding base
  modified_base (5)..(5): 2'-O-methyl corresponding base
  modified_base (6)..(6): 2'-hydroxy corresponding base
  modified_base (7)..(7): 2'-hydroxy corresponding base
  modified_base (8)..(8): 2'-O-methyl corresponding base
  modified_base (9)..(9): 2'-hydroxy corresponding base
  modified_base (10)..(10): 2'-O-methyl corresponding base
  modified_base (11)..(11): 2'-O-methyl corresponding base
  modified_base (12)..(12): 2'-O-methyl corresponding base
  modified_base (13)..(13): 2'-O-methyl corresponding base
  modified_base (14)..(14): 2'-O-methyl corresponding base
  modified_base (15)..(15): 2'-hydroxy corresponding base
  modified_base (16)..(16): 2'-hydroxy corresponding base
  modified_base (17)..(17): 2'-O-methyl corresponding base
  modified_base (18)..(18): 2'-hydroxy corresponding base
  modified_base (19)..(19): 2'-hydroxy corresponding base
  modified_base (20)..(20): deoxythymidine
  modified_base (21)..(21): 5'-thio thymidine
ucauuggugccuccagcgatt

SEQ ID NO: 578 - DNA, 21 bp, Artificial Sequence
  Description of Artificial Sequence: Synthetic oligonucleotide
  Description of Combined DNA/RNA Molecule: Synthetic oligonucleotide
  siRNAs to PCSK9
  modified_base (1)..(1): 2'-hydroxy corresponding base
  modified_base (2)..(2): 2'-hydroxy corresponding base
  modified_base (3)..(3): 2'-hydroxy corresponding base
  modified_base (4)..(4): 2'-hydroxy corresponding base
  modified_base (5)..(5): 2'-hydroxy corresponding base
  modified_base (6)..(6): 2'-hydroxy corresponding base
  modified_base (7)..(7): 2'-hydroxy corresponding base
  modified_base (8)..(8): 2'-hydroxy corresponding base
  modified_base (9)..(9): 2'-hydroxy corresponding base
  modified_base (10)..(10): 2'-hydroxy corresponding base
  modified_base (11)..(11): 2'-O-methyl corresponding base
  modified_base (12)..(12): 2'-hydroxy corresponding base
  modified_base (13)..(13): 2'-hydroxy corresponding base
  modified_base (14)..(14): 2'-O-methyl corresponding base
  modified_base (15)..(15): 2'-hydroxy corresponding base
  modified_base (16)..(16): 2'-hydroxy corresponding base
  modified_base (17)..(17): 2'-hydroxy corresponding base
  modified_base (18)..(18): 2'-hydroxy corresponding base
  modified_base (19)..(19): 2'-hydroxy corresponding base
  modified_base (20)..(20): deoxythymidine
  modified_base (21)..(21): 5'-thio thymidine
ucgcuggaggcaccaaugatt

SEQ ID NO: 579 - DNA, 21 bp, Artificial Sequence
  Description of Artificial Sequence: Synthetic oligonucleotide
  Description of Combined DNA/RNA Molecule: Synthetic oligonucleotide
  siRNAs to PCSK9
  modified_base (1)..(1): 2'-hydroxy corresponding base
  modified_base (2)..(2): 2'-hydroxy corresponding base
  modified_base (3)..(3): 2'-hydroxy corresponding base
  modified_base (4)..(4): 2'-hydroxy corresponding base
  modified_base (5)..(5): 2'-hydroxy corresponding base
  modified_base (6)..(6): 2'-hydroxy corresponding base
  modified_base (7)..(7): 2'-hydroxy corresponding base
  modified_base (8)..(8): 2'-hydroxy corresponding base
  modified_base (9)..(9): 2'-hydroxy corresponding base
  modified_base (10)..(10): 2'-hydroxy corresponding base
  modified_base (11)..(11): 2'-hydroxy corresponding base
  modified_base (12)..(12): 2'-hydroxy corresponding base
  modified_base (13)..(13): 2'-hydroxy corresponding base
  modified_base (14)..(14): 2'-hydroxy corresponding base
  modified_base (15)..(15): 2'-hydroxy corresponding base
  modified_base (16)..(16): 2'-hydroxy corresponding base
  modified_base (17)..(17): 2'-hydroxy corresponding base
  modified_base (18)..(18): 2'-hydroxy corresponding base
  modified_base (19)..(19): 2'-hydroxy corresponding base
  modified_base (20)..(20): deoxythymidine
  modified_base (21)..(21): 5'-thio thymidine
agcaccugcuuugugucactt

SEQ ID NO: 580 - DNA, 21 bp, Artificial Sequence
  Description of Artificial Sequence: Synthetic oligonucleotide
  Description of Combined DNA/RNA Molecule: Synthetic oligonucleotide
  siRNAs to PCSK9
  modified_base (1)..(1): 2'-hydroxy corresponding base
  modified_base (2)..(2): 2'-hydroxy corresponding base
  modified_base (3)..(3): 2'-hydroxy corresponding base
  modified_base (4)..(4): 2'-hydroxy corresponding base
  modified_base (5)..(5): 2'-hydroxy corresponding base
  modified_base (6)..(6): 2'-hydroxy corresponding base
  modified_base (7)..(7): 2'-hydroxy corresponding base
  modified_base (8)..(8): 2'-hydroxy corresponding base
  modified_base (9)..(9): 2'-hydroxy corresponding base
  modified_base (10)..(10): 2'-hydroxy corresponding base
  modified_base (11)..(11): 2'-hydroxy corresponding base
  modified_base (12)..(12): 2'-hydroxy corresponding base
  modified_base (13)..(13): 2'-hydroxy corresponding base
  modified_base (14)..(14): 2'-hydroxy corresponding base
  modified_base (15)..(15): 2'-hydroxy corresponding base
  modified_base (16)..(16): 2'-hydroxy corresponding base
  modified_base (17)..(17): 2'-hydroxy corresponding base
  modified_base (18)..(18): 2'-hydroxy corresponding base
  modified_base (19)..(19): 2'-hydroxy corresponding base
  modified_base (20)..(20): deoxythymidine
  modified_base (21)..(21): 5'-thio thymidine
gugacacaaagcaggugcutt

SEQ ID NO: 581 - DNA, 21 bp, Artificial Sequence
  Description of Artificial Sequence: Synthetic oligonucleotide
  Description of Combined DNA/RNA Molecule: Synthetic oligonucleotide
  siRNAs to PCSK9
  modified_base (1)..(1): 2'-hydroxy corresponding base
  modified_base (2)..(2): 2'-hydroxy corresponding base
  modified_base (3)..(3): 2'-O-methyl corresponding base
  modified_base (4)..(4): 2'-hydroxy corresponding base
  modified_base (5)..(5): 2'-O-methyl corresponding base
  modified_base (6)..(6): 2'-O-methyl corresponding base
  modified_base (7)..(7): 2'-O-methyl corresponding base
  modified_base (8)..(8): 2'-hydroxy corresponding base
  modified_base (9)..(9): 2'-O-methyl corresponding base
  modified_base (10)..(10): 2'-O-methyl corresponding base
  modified_base (11)..(11): 2'-O-methyl corresponding base
  modified_base (12)..(12): 2'-O-methyl corresponding base
  modified_base (13)..(13): 2'-hydroxy corresponding base
  modified_base (14)..(14): 2'-O-methyl corresponding base
  modified_base (15)..(15): 2'-hydroxy corresponding base
  modified_base (16)..(16): 2'-O-methyl corresponding base
  modified_base (17)..(17): 2'-O-methyl corresponding base
  modified_base (18)..(18): 2'-hydroxy corresponding base
  modified_base (19)..(19): 2'-O-methyl corresponding base
  modified_base (20)..(20): deoxythymidine
  modified_base (21)..(21): 5'-thio thymidine
agcaccugcuuugugucactt

SEQ ID NO: 582 - DNA, 21 bp, Artificial Sequence
  Description of Artificial Sequence: Synthetic oligonucleotide
  Description of Combined DNA/RNA Molecule: Synthetic oligonucleotide
  siRNAs to PCSK9
  modified_base (1)..(1): 2'-hydroxy corresponding base
  modified_base (2)..(2): 2'-hydroxy corresponding base
  modified_base (3)..(3): 2'-hydroxy corresponding base
  modified_base (4)..(4): 2'-hydroxy corresponding base
  modified_base (5)..(5): 2'-O-methyl corresponding base
  modified_base (6)..(6): 2'-hydroxy corresponding base
  modified_base (7)..(7): 2'-O-methyl corresponding base
  modified_base (8)..(8): 2'-hydroxy corresponding base
  modified_base (9)..(9): 2'-hydroxy corresponding base
  modified_base (10)..(10): 2'-hydroxy corresponding base
  modified_base (11)..(11): 2'-hydroxy corresponding base
  modified_base (12)..(12): 2'-O-methyl corresponding base
  modified_base (13)..(13): 2'-hydroxy corresponding base
  modified_base (14)..(14): 2'-hydroxy corresponding base
  modified_base (15)..(15): 2'-hydroxy corresponding base
  modified_base (16)..(16): 2'-hydroxy corresponding base
  modified_base (17)..(17): 2'-hydroxy corresponding base
  modified_base (18)..(18): 2'-hydroxy corresponding base
  modified_base (19)..(19): 2'-hydroxy corresponding base
  modified_base (20)..(20): deoxythymidine
  modified_base (21)..(21): 5'-thio thymidine
gugacacaaagcaggugcutt

SEQ ID NO: 583 - DNA, 21 bp, Artificial Sequence
  Description of Artificial Sequence: Synthetic oligonucleotide
  Description of Combined DNA/RNA Molecule: Synthetic oligonucleotide
  siRNAs to PCSK9
  modified_base (1)..(1): 2'-hydroxy corresponding base
  modified_base (2)..(2): 2'-hydroxy corresponding base
  modified_base (3)..(3): 2'-hydroxy corresponding base
  modified_base (4)..(4): 2'-hydroxy corresponding base
  modified_base (5)..(5): 2'-hydroxy corresponding base
  modified_base (6)..(6): 2'-hydroxy corresponding base
  modified_base (7)..(7): 2'-hydroxy corresponding base
  modified_base (8)..(8): 2'-hydroxy corresponding base
  modified_base (9)..(9): 2'-hydroxy corresponding base
  modified_base (10)..(10): 2'-hydroxy corresponding base
  modified_base (11)..(11): 2'-hydroxy corresponding base
  modified_base (12)..(12): 2'-hydroxy corresponding base
  modified_base (13)..(13): 2'-hydroxy corresponding base
  modified_base (14)..(14): 2'-hydroxy corresponding base
  modified_base (15)..(15): 2'-hydroxy corresponding base
  modified_base (16)..(16): 2'-hydroxy corresponding base
  modified_base (17)..(17): 2'-hydroxy corresponding base
  modified_base (18)..(18): 2'-hydroxy corresponding base
  modified_base (19)..(19): 2'-hydroxy corresponding base
  modified_base (20)..(20): deoxythymidine
  modified_base (21)..(21): deoxythymidine
cacagagugggacaucacatt

SEQ ID NO: 584 - DNA, 21 bp, Artificial Sequence
  Description of Artificial Sequence: Synthetic oligonucleotide
  Description of Combined DNA/RNA Molecule: Synthetic oligonucleotide
  siRNAs to PCSK9
  modified_base (1)..(1): 2'-hydroxy corresponding base
  modified_base (2)..(2): 2'-hydroxy corresponding base
  modified_base (3)..(3): 2'-hydroxy corresponding base
  modified_base (4)..(4): 2'-hydroxy corresponding base
  modified_base (5)..(5): 2'-hydroxy corresponding base
  modified_base (6)..(6): 2'-hydroxy corresponding base
  modified_base (7)..(7): 2'-hydroxy corresponding base
  modified_base (8)..(8): 2'-hydroxy corresponding base
  modified_base (9)..(9): 2'-hydroxy corresponding base
  modified_base (10)..(10): 2'-hydroxy corresponding base
  modified_base (11)..(11): 2'-hydroxy corresponding base
  modified_base (12)..(12): 2'-hydroxy corresponding base
  modified_base (13)..(13): 2'-hydroxy corresponding base
  modified_base (14)..(14): 2'-hydroxy corresponding base
  modified_base (15)..(15): 2'-hydroxy corresponding base
  modified_base (16)..(16): 2'-hydroxy corresponding base
  modified_base (17)..(17): 2'-hydroxy corresponding base
  modified_base (18)..(18): 2'-hydroxy corresponding base
  modified_base (19)..(19): 2'-hydroxy corresponding base
  modified_base (20)..(20): deoxythymidine
  modified_base (21)..(21): deoxythymidine
ugugaugucccacucugugtt

SEQ ID NO: 585 - DNA, 21 bp, Artificial Sequence
  Description of Artificial Sequence: Synthetic oligonucleotide
  Description of Combined DNA/RNA Molecule: Synthetic oligonucleotide
  siRNAs to PCSK9
  modified_base (1)..(1): 2'-hydroxy corresponding base
  modified_base (2)..(2): 2'-hydroxy corresponding base
  modified_base (3)..(3): 2'-hydroxy corresponding base
  modified_base (4)..(4): 2'-hydroxy corresponding base
  modified_base (5)..(5): 2'-hydroxy corresponding base
  modified_base (6)..(6): 2'-hydroxy corresponding base
  modified_base (7)..(7): 2'-hydroxy corresponding base
  modified_base (8)..(8): 2'-hydroxy corresponding base
  modified_base (9)..(9): 2'-hydroxy corresponding base
  modified_base (10)..(10): 2'-hydroxy corresponding base
  modified_base (11)..(11): 2'-hydroxy corresponding base
  modified_base (12)..(12): 2'-hydroxy corresponding base
  modified_base (13)..(13): 2'-hydroxy corresponding base
  modified_base (14)..(14): 2'-hydroxy corresponding base
  modified_base (15)..(15): 2'-hydroxy corresponding base
  modified_base (16)..(16): 2'-hydroxy corresponding base
  modified_base (17)..(17): 2'-hydroxy corresponding base
  modified_base (18)..(18): 2'-hydroxy corresponding base
  modified_base (19)..(19): 2'-hydroxy corresponding base
  modified_base (20)..(20): deoxythymidine
  modified_base (21)..(21): 5'-thio thymidine
augcugucugccgagccggtt

SEQ ID NO: 586 - DNA, 21 bp, Artificial Sequence
  Description of Artificial Sequence: Synthetic oligonucleotide
  Description of Combined DNA/RNA Molecule: Synthetic oligonucleotide
  siRNAs to PCSK9
  modified_base (1)..(1): 2'-hydroxy corresponding base
  modified_base (2)..(2): 2'-hydroxy corresponding base
  modified_base (3)..(3): 2'-hydroxy corresponding base
  modified_base (4)..(4): 2'-hydroxy corresponding base
  modified_base (5)..(5): 2'-hydroxy corresponding base
  modified_base (6)..(6): 2'-hydroxy corresponding base
  modified_base (7)..(7): 2'-hydroxy corresponding base
  modified_base (8)..(8): 2'-hydroxy corresponding base
  modified_base (9)..(9): 2'-hydroxy corresponding base
  modified_base (10)..(10): 2'-hydroxy corresponding base
  modified_base (11)..(11): 2'-hydroxy corresponding base
  modified_base (12)..(12): 2'-hydroxy corresponding base
  modified_base (13)..(13): 2'-hydroxy corresponding base
  modified_base (14)..(14): 2'-hydroxy corresponding base
  modified_base (15)..(15): 2'-hydroxy corresponding base
  modified_base (16)..(16): 2'-hydroxy corresponding base
  modified_base (17)..(17): 2'-hydroxy corresponding base
  modified_base (18)..(18): 2'-hydroxy corresponding base
  modified_base (19)..(19): 2'-hydroxy corresponding base
  modified_base (20)..(20): deoxythymidine
  modified_base (21)..(21): 5'-thio thymidine
ccggcucggcagacagcautt

SEQ ID NO: 587 - DNA, 21 bp, Artificial Sequence
  Description of Artificial Sequence: Synthetic oligonucleotide
  Description of Combined DNA/RNA Molecule: Synthetic oligonucleotide
  siRNAs to PCSK9
  modified_base (1)..(1): 2'-hydroxy corresponding base
  modified_base (2)..(2): 2'-O-methyl corresponding base
  modified_base (3)..(3): 2'-hydroxy corresponding base
  modified_base (4)..(4): 2'-O-methyl corresponding base
  modified_base (5)..(5): 2'-O-methyl corresponding base
  modified_base (6)..(6): 2'-hydroxy corresponding base
  modified_base (7)..(7): 2'-O-methyl corresponding base
  modified_base (8)..(8): 2'-O-methyl corresponding base
  modified_base (9)..(9): 2'-O-methyl corresponding base
  modified_base (10)..(10): 2'-hydroxy corresponding base
  modified_base (11)..(11): 2'-O-methyl corresponding base
  modified_base (12)..(12): 2'-O-methyl corresponding base
  modified_base (13)..(13): 2'-hydroxy corresponding base
  modified_base (14)..(14): 2'-hydroxy corresponding base
  modified_base (15)..(15): 2'-hydroxy corresponding base
  modified_base (16)..(16): 2'-O-methyl corresponding base
  modified_base (17)..(17): 2'-O-methyl corresponding base
  modified_base (18)..(18): 2'-hydroxy corresponding base
  modified_base (19)..(19): 2'-hydroxy corresponding base
  modified_base (20)..(20): deoxythymidine
  modified_base (21)..(21): 5'-thio thymidine
augcugucugccgagccggtt

SEQ ID NO: 588 - DNA, 21 bp, Artificial Sequence
  Description of Artificial Sequence: Synthetic oligonucleotide
  Description of Combined DNA/RNA Molecule: Synthetic oligonucleotide
  siRNAs to PCSK9
  modified_base (1)..(1): 2'-hydroxy corresponding base
  modified_base (2)..(2): 2'-hydroxy corresponding base
  modified_base (3)..(3): 2'-hydroxy corresponding base
  modified_base (4)..(4): 2'-hydroxy corresponding base
  modified_base (5)..(5): 2'-hydroxy corresponding base
  modified_base (6)..(6): 2'-hydroxy corresponding base
  modified_base (7)..(7): 2'-hydroxy corresponding base
  modified_base (8)..(8): 2'-hydroxy corresponding base
  modified_base (9)..(9): 2'-hydroxy corresponding base
  modified_base (10)..(10): 2'-O-methyl corresponding base
  modified_base (11)..(11): 2'-hydroxy corresponding base
  modified_base (12)..(12): 2'-hydroxy corresponding base
  modified_base (13)..(13): 2'-hydroxy corresponding base
  modified_base (14)..(14): 2'-O-methyl corresponding base
  modified_base (15)..(15): 2'-hydroxy corresponding base
  modified_base (16)..(16): 2'-hydroxy corresponding base
  modified_base (17)..(17): 2'-O-methyl corresponding base
  modified_base (18)..(18): 2'-hydroxy corresponding base
  modified_base (19)..(19): 2'-hydroxy corresponding base
  modified_base (20)..(20): deoxythymidine
  modified_base (21)..(21): 5'-thio thymidine
ccggcucggcagacagcautt

SEQ ID NO: 589 - DNA, 21 bp, Artificial Sequence
  Description of Artificial Sequence: Synthetic oligonucleotide
  Description of Combined DNA/RNA Molecule: Synthetic oligonucleotide
  siRNAs to PCSK9
  modified_base (1)..(1): 2'-hydroxy corresponding base
  modified_base (2)..(2): 2'-hydroxy corresponding base
  modified_base (3)..(3): 2'-hydroxy corresponding base
  modified_base (4)..(4): 2'-hydroxy corresponding base
  modified_base (5)..(5): 2'-hydroxy corresponding base
  modified_base (6)..(6): 2'-hydroxy corresponding base
  modified_base (7)..(7): 2'-hydroxy corresponding base
  modified_base (8)..(8): 2'-hydroxy corresponding base
  modified_base (9)..(9): 2'-hydroxy corresponding base
  modified_base (10)..(10): 2'-hydroxy corresponding base
  modified_base (11)..(11): 2'-hydroxy corresponding base
  modified_base (12)..(12): 2'-hydroxy corresponding base
  modified_base (13)..(13): 2'-hydroxy corresponding base
  modified_base (14)..(14): 2'-hydroxy corresponding base
  modified_base (15)..(15): 2'-hydroxy corresponding base
  modified_base (16)..(16): 2'-hydroxy corresponding base
  modified_base (17)..(17): 2'-hydroxy corresponding base
  modified_base (18)..(18): 2'-hydroxy corresponding base
  modified_base (19)..(19): 2'-hydroxy corresponding base
  modified_base (20)..(20): deoxythymidine
  modified_base (21)..(21): 5'-thio thymidine
gucugccgagccggagcuctt

SEQ ID NO: 590 - DNA, 21 bp, Artificial Sequence
  Description of Artificial Sequence: Synthetic oligonucleotide
  Description of Combined DNA/RNA Molecule: Synthetic oligonucleotide
  siRNAs to PCSK9
  modified_base (1)..(1): 2'-hydroxy corresponding base
  modified_base (2)..(2): 2'-hydroxy corresponding base
  modified_base (3)..(3): 2'-hydroxy corresponding base
  modified_base (4)..(4): 2'-hydroxy corresponding base
  modified_base (5)..(5): 2'-hydroxy corresponding base
  modified_base (6)..(6): 2'-hydroxy corresponding base
  modified_base (7)..(7): 2'-hydroxy corresponding base
  modified_base (8)..(8): 2'-hydroxy corresponding base
  modified_base (9)..(9): 2'-hydroxy corresponding base
  modified_base (10)..(10): 2'-hydroxy corresponding base
  modified_base (11)..(11): 2'-hydroxy corresponding base
  modified_base (12)..(12): 2'-hydroxy corresponding base
  modified_base (13)..(13): 2'-hydroxy corresponding base
  modified_base (14)..(14): 2'-hydroxy corresponding base
  modified_base (15)..(15): 2'-hydroxy corresponding base
  modified_base (16)..(16): 2'-hydroxy corresponding base
  modified_base (17)..(17): 2'-hydroxy corresponding base
  modified_base (18)..(18): 2'-hydroxy corresponding base
  modified_base (19)..(19): 2'-hydroxy corresponding base
  modified_base (20)..(20): deoxythymidine
  modified_base (21)..(21): 5'-thio thymidine
gagcuccggcucggcagactt

SEQ ID NO: 591 - DNA, 21 bp, Artificial Sequence
  Description of Artificial Sequence: Synthetic oligonucleotide
  Description of Combined DNA/RNA Molecule: Synthetic oligonucleotide
  siRNAs to PCSK9
  modified_base (1)..(1): 2'-hydroxy corresponding base
  modified_base (2)..(2): 2'-O-methyl corresponding base
  modified_base (3)..(3): 2'-O-methyl corresponding base
  modified_base (4)..(4): 2'-O-methyl corresponding base
  modified_base (5)..(5): 2'-hydroxy corresponding base
  modified_base (6)..(6): 2'-O-methyl corresponding base
  modified_base (7)..(7): 2'-O-methyl corresponding base
  modified_base (8)..(8): 2'-hydroxy corresponding base
  modified_base (9)..(9): 2'-hydroxy corresponding base
  modified_base (10)..(10): 2'-hydroxy corresponding base
  modified_base (11)..(11): 2'-O-methyl corresponding base
  modified_base (12)..(12): 2'-O-methyl corresponding base
  modified_base (13)..(13): 2'-hydroxy corresponding base
  modified_base (14)..(14): 2'-hydroxy corresponding base
  modified_base (15)..(15): 2'-hydroxy corresponding base
  modified_base (16)..(16): 2'-hydroxy corresponding base
  modified_base (17)..(17): 2'-O-methyl corresponding base
  modified_base (18)..(18): 2'-O-methyl corresponding base
  modified_base (19)..(19): 2'-O-methyl corresponding base
  modified_base (20)..(20): deoxythymidine
  modified_base (21)..(21): 5'-thio thymidine
gucugccgagccggagcuctt

SEQ ID NO: 592 - DNA, 21 bp, Artificial Sequence
  Description of Artificial Sequence: Synthetic oligonucleotide
  Description of Combined DNA/RNA Molecule: Synthetic oligonucleotide
  siRNAs to PCSK9
  modified_base (1)..(1): 2'-hydroxy corresponding base
  modified_base (2)..(2): 2'-hydroxy corresponding base
  modified_base (3)..(3): 2'-hydroxy corresponding base
  modified_base (4)..(4): 2'-hydroxy corresponding base
  modified_base (5)..(5): 2'-hydroxy corresponding base
  modified_base (6)..(6): 2'-hydroxy corresponding base
  modified_base (7)..(7): 2'-hydroxy corresponding base
  modified_base (8)..(8): 2'-hydroxy corresponding base
  modified_base (9)..(9): 2'-hydroxy corresponding base
  modified_base (10)..(10): 2'-hydroxy corresponding base
  modified_base (11)..(11): 2'-hydroxy corresponding base
  modified_base (12)..(12): 2'-hydroxy corresponding base
  modified_base (13)..(13): 2'-hydroxy corresponding base
  modified_base (14)..(14): 2'-hydroxy corresponding base
  modified_base (15)..(15): 2'-O-methyl corresponding base
  modified_base (16)..(16): 2'-hydroxy corresponding base
  modified_base (17)..(17): 2'-hydroxy corresponding base
  modified_base (18)..(18): 2'-hydroxy corresponding base
  modified_base (19)..(19): 2'-hydroxy corresponding base
  modified_base (20)..(20): deoxythymidine
  modified_base (21)..(21): 5'-thio thymidine
gagcuccggcucggcagactt

SEQ ID NO: 593 - DNA, 21 bp, Artificial Sequence
  Description of Artificial Sequence: Synthetic oligonucleotide
  Description of Combined DNA/RNA Molecule: Synthetic oligonucleotide
  siRNAs to PCSK9
  modified_base (1)..(1): 2'-hydroxy corresponding base
  modified_base (2)..(2): 2'-hydroxy corresponding base
  modified_base (3)..(3): 2'-hydroxy corresponding base
  modified_base (4)..(4): 2'-hydroxy corresponding base
  modified_base (5)..(5): 2'-hydroxy corresponding base
  modified_base (6)..(6): 2'-hydroxy corresponding base
  modified_base (7)..(7): 2'-hydroxy corresponding base
  modified_base (8)..(8): 2'-hydroxy corresponding base
  modified_base (9)..(9): 2'-hydroxy corresponding base
  modified_base (10)..(10): 2'-hydroxy corresponding base
  modified_base (11)..(11): 2'-hydroxy corresponding base
  modified_base (12)..(12): 2'-hydroxy corresponding base
  modified_base (13)..(13): 2'-hydroxy corresponding base
  modified_base (14)..(14): 2'-hydroxy corresponding base
  modified_base (15)..(15): 2'-hydroxy corresponding base
  modified_base (16)..(16): 2'-hydroxy corresponding base
  modified_base (17)..(17): 2'-hydroxy corresponding base
  modified_base (18)..(18): 2'-hydroxy corresponding base
  modified_base (19)..(19): 2'-hydroxy corresponding base
  modified_base (20)..(20): deoxythymidine
  modified_base (21)..(21): 5'-thio thymidine
guugaggcagagacugauctt

SEQ ID NO: 594 - DNA, 21 bp, Artificial Sequence
  Description of Artificial Sequence: Synthetic oligonucleotide
  Description of Combined DNA/RNA Molecule: Synthetic oligonucleotide
  siRNAs to PCSK9
  modified_base (1)..(1): 2'-hydroxy corresponding base
  modified_base (2)..(2): 2'-hydroxy corresponding base
  modified_base (3)..(3): 2'-hydroxy corresponding base
  modified_base (4)..(4): 2'-hydroxy corresponding base
  modified_base (5)..(5): 2'-hydroxy corresponding base
  modified_base (6)..(6): 2'-hydroxy corresponding base
  modified_base (7)..(7): 2'-hydroxy corresponding base
  modified_base (8)..(8): 2'-hydroxy corresponding base
  modified_base (9)..(9): 2'-hydroxy corresponding base
  modified_base (10)..(10): 2'-hydroxy corresponding base
  modified_base (11)..(11): 2'-hydroxy corresponding base
  modified_base (12)..(12): 2'-hydroxy corresponding base
  modified_base (13)..(13): 2'-hydroxy corresponding base
  modified_base (14)..(14): 2'-hydroxy corresponding base
  modified_base (15)..(15): 2'-hydroxy corresponding base
  modified_base (16)..(16): 2'-hydroxy corresponding base
  modified_base (17)..(17): 2'-hydroxy corresponding base
  modified_base (18)..(18): 2'-hydroxy corresponding base
  modified_base (19)..(19): 2'-hydroxy corresponding base
  modified_base (20)..(20): deoxythymidine
  modified_base (21)..(21): 5'-thio thymidine
gaucagucucugccucaactt

SEQ ID NO: 595 - DNA, 21 bp, Artificial Sequence
  Description of Artificial Sequence: Synthetic oligonucleotide
  Description of Combined DNA/RNA Molecule: Synthetic oligonucleotide
  siRNAs to PCSK9
  modified_base (1)..(1): 2'-hydroxy corresponding base
  modified_base (2)..(2): 2'-O-methyl corresponding base
  modified_base (3)..(3): 2'-O-methyl corresponding base
  modified_base (4)..(4): 2'-hydroxy corresponding base
  modified_base (5)..(5): 2'-hydroxy corresponding base
  modified_base (6)..(6): 2'-hydroxy corresponding base
  modified_base (7)..(7): 2'-hydroxy corresponding base
  modified_base (8)..(8): 2'-O-methyl corresponding base
  modified_base (9)..(9): 2'-hydroxy corresponding base
  modified_base (10)..(10): 2'-hydroxy corresponding base
  modified_base (11)..(11): 2'-hydroxy corresponding base
  modified_base (12)..(12): 2'-hydroxy corresponding base
  modified_base (13)..(13): 2'-hydroxy corresponding base
  modified_base (14)..(14): 2'-O-methyl corresponding base
  modified_base (15)..(15): 2'-O-methyl corresponding base
  modified_base (16)..(16): 2'-hydroxy corresponding base
  modified_base (17)..(17): 2'-hydroxy corresponding base
  modified_base (18)..(18): 2'-O-methyl corresponding base
  modified_base (19)..(19): 2'-O-methyl corresponding base
  modified_base (20)..(20): deoxythymidine
  modified_base (21)..(21): 5'-thio thymidine
guugaggcagagacugauctt

SEQ ID NO: 596 - DNA, 21 bp, Artificial Sequence
  Description of Artificial Sequence: Synthetic oligonucleotide
  Description of Combined DNA/RNA Molecule: Synthetic oligonucleotide
  siRNAs to PCSK9
  modified_base (1)..(1): 2'-hydroxy corresponding base
  modified_base (2)..(2): 2'-hydroxy corresponding base
  modified_base (3)..(3): 2'-hydroxy corresponding base
  modified_base (4)..(4): 2'-O-methyl corresponding base
  modified_base (5)..(5): 2'-hydroxy corresponding base
  modified_base (6)..(6): 2'-hydroxy corresponding base
  modified_base (7)..(7): 2'-hydroxy corresponding base
  modified_base (8)..(8): 2'-hydroxy corresponding base
  modified_base (9)..(9): 2'-hydroxy corresponding base
  modified_base (10)..(10): 2'-hydroxy corresponding base
  modified_base (11)..(11): 2'-hydroxy corresponding base
  modified_base (12)..(12): 2'-hydroxy corresponding base
  modified_base (13)..(13): 2'-hydroxy corresponding base
  modified_base (14)..(14): 2'-hydroxy corresponding base
  modified_base (15)..(15): 2'-hydroxy corresponding base
  modified_base (16)..(16): 2'-O-methyl corresponding base
  modified_base (17)..(17): 2'-hydroxy corresponding base
  modified_base (18)..(18): 2'-hydroxy corresponding base
  modified_base (19)..(19): 2'-hydroxy corresponding base
  modified_base (20)..(20): deoxythymidine
  modified_base (21)..(21): 5'-thio thymidine
gaucagucucugccucaactt

SEQ ID NO: 597 - DNA, 21 bp, Artificial Sequence
  Description of Artificial Sequence: Synthetic oligonucleotide
  Description of Combined DNA/RNA Molecule: Synthetic oligonucleotide
  siRNAs to PCSK9
  modified_base (1)..(1): 2'-hydroxy corresponding base
  modified_base (2)..(2): 2'-hydroxy corresponding base
  modified_base (3)..(3): 2'-hydroxy corresponding base
  modified_base (4)..(4): 2'-hydroxy corresponding base
  modified_base (5)..(5): 2'-hydroxy corresponding base
  modified_base (6)..(6): 2'-hydroxy corresponding base
  modified_base (7)..(7): 2'-hydroxy corresponding base
  modified_base (8)..(8): 2'-hydroxy corresponding base
  modified_base (9)..(9): 2'-hydroxy corresponding base
  modified_base (10)..(10): 2'-hydroxy corresponding base
  modified_base (11)..(11): 2'-hydroxy corresponding base
  modified_base (12)..(12): 2'-hydroxy corresponding base
  modified_base (13)..(13): 2'-hydroxy corresponding base
  modified_base (14)..(14): 2'-hydroxy corresponding base
  modified_base (15)..(15): 2'-hydroxy corresponding base
  modified_base (16)..(16): 2'-hydroxy corresponding base
  modified_base (17)..(17): 2'-hydroxy corresponding base
  modified_base (18)..(18): 2'-hydroxy corresponding base
  modified_base (19)..(19): 2'-hydroxy corresponding base
  modified_base (20)..(20): deoxythymidine
  modified_base (21)..(21): 5'-thio thymidine
gcagagacugauccacuuctt

SEQ ID NO: 598 - DNA, 21 bp, Artificial Sequence
  Description of Artificial Sequence: Synthetic oligonucleotide
  Description of Combined DNA/RNA Molecule: Synthetic oligonucleotide
  siRNAs to PCSK9
  modified_base (1)..(1): 2'-hydroxy corresponding base
  modified_base (2)..(2): 2'-hydroxy corresponding base
  modified_base (3)..(3): 2'-hydroxy corresponding base
  modified_base (4)..(4): 2'-hydroxy corresponding base
  modified_base (5)..(5): 2'-hydroxy corresponding base
  modified_base (6)..(6): 2'-hydroxy corresponding base
  modified_base (7)..(7): 2'-hydroxy corresponding base
  modified_base (8)..(8): 2'-hydroxy corresponding base
  modified_base (9)..(9): 2'-hydroxy corresponding base
  modified_base (10)..(10): 2'-hydroxy corresponding base
  modified_base (11)..(11): 2'-hydroxy corresponding base
  modified_base (12)..(12): 2'-hydroxy corresponding base
  modified_base (13)..(13): 2'-hydroxy corresponding base
  modified_base (14)..(14): 2'-hydroxy corresponding base
  modified_base (15)..(15): 2'-hydroxy corresponding base
  modified_base (16)..(16): 2'-hydroxy corresponding base
  modified_base (17)..(17): 2'-hydroxy corresponding base
  modified_base (18)..(18): 2'-hydroxy corresponding base
  modified_base (19)..(19): 2'-hydroxy corresponding base
  modified_base (20)..(20): deoxythymidine
  modified_base (21)..(21): 5'-thio thymidine
gaaguggaucagucucugctt

SEQ ID NO: 599 - DNA, 21 bp, Artificial Sequence
  Description of Artificial Sequence: Synthetic oligonucleotide
  Description of Combined DNA/RNA Molecule: Synthetic oligonucleotide
  siRNAs to PCSK9
  modified_base (1)..(1): 2'-hydroxy corresponding base
  modified_base (2)..(2): 2'-O-methyl corresponding base
  modified_base (3)..(3): 2'-hydroxy corresponding base
  modified_base (4)..(4): 2'-hydroxy corresponding base
  modified_base (5)..(5): 2'-hydroxy corresponding base
  modified_base (6)..(6): 2'-hydroxy corresponding base
  modified_base (7)..(7): 2'-hydroxy corresponding base
  modified_base (8)..(8): 2'-O-methyl corresponding base
  modified_base (9)..(9): 2'-O-methyl corresponding base
  modified_base (10)..(10): 2'-hydroxy corresponding base
  modified_base (11)..(11): 2'-hydroxy corresponding base
  modified_base (12)..(12): 2'-O-methyl corresponding base
  modified_base (13)..(13): 2'-O-methyl corresponding base
  modified_base (14)..(14): 2'-O-methyl corresponding base
  modified_base (15)..(15): 2'-hydroxy corresponding base
  modified_base (16)..(16): 2'-O-methyl corresponding base
  modified_base (17)..(17): 2'-O-methyl corresponding base
  modified_base (18)..(18): 2'-O-methyl corresponding base
  modified_base (19)..(19): 2'-O-methyl corresponding base
  modified_base (20)..(20): deoxythymidine
  modified_base (21)..(21): 5'-thio thymidine
gcagagacugauccacuuctt

SEQ ID NO: 600 - DNA, 21 bp, Artificial Sequence
  Description of Artificial Sequence: Synthetic oligonucleotide
  Description of Combined DNA/RNA Molecule: Synthetic oligonucleotide
  siRNAs to PCSK9
  modified_base (1)..(1): 2'-hydroxy corresponding base
  modified_base (2)..(2): 2'-hydroxy corresponding base
  modified_base (3)..(3): 2'-hydroxy corresponding base
  modified_base (4)..(4): 2'-hydroxy corresponding base
  modified_base (5)..(5): 2'-hydroxy corresponding base
  modified_base (6)..(6): 2'-hydroxy corresponding base
  modified_base (7)..(7): 2'-hydroxy corresponding base
  modified_base (8)..(8): 2'-hydroxy corresponding base
  modified_base (9)..(9): 2'-hydroxy corresponding base
  modified_base (10)..(10): 2'-O-methyl corresponding base
  modified_base (11)..(11): 2'-hydroxy corresponding base
  modified_base (12)..(12): 2'-hydroxy corresponding base
  modified_base (13)..(13): 2'-hydroxy corresponding base
  modified_base (14)..(14): 2'-hydroxy corresponding base
  modified_base (15)..(15): 2'-hydroxy corresponding base
  modified_base (16)..(16): 2'-hydroxy corresponding base
  modified_base (17)..(17): 2'-hydroxy corresponding base
  modified_base (18)..(18): 2'-hydroxy corresponding base
  modified_base (19)..(19): 2'-hydroxy corresponding base
  modified_base (20)..(20): deoxythymidine
  modified_base (21)..(21): 5'-thio thymidine
gaaguggaucagucucugctt

SEQ ID NO: 601 - DNA, 21 bp, Artificial Sequence
  Description of Artificial Sequence: Synthetic oligonucleotide
  Description of Combined DNA/RNA Molecule: Synthetic oligonucleotide
  siRNAs to PCSK9
  modified_base (1)..(1): 2'-hydroxy corresponding base
  modified_base (2)..(2): 2'-hydroxy corresponding base
  modified_base (3)..(3): 2'-hydroxy corresponding base
  modified_base (4)..(4): 2'-hydroxy corresponding base
  modified_base (5)..(5): 2'-hydroxy corresponding base
  modified_base (6)..(6): 2'-hydroxy corresponding base
  modified_base (7)..(7): 2'-hydroxy corresponding base
  modified_base (8)..(8): 2'-hydroxy corresponding base
  modified_base (9)..(9): 2'-hydroxy corresponding base
  modified_base (10)..(10): 2'-hydroxy corresponding base
  modified_base (11)..(11): 2'-hydroxy corresponding base
  modified_base (12)..(12): 2'-hydroxy corresponding base
  modified_base (13)..(13): 2'-hydroxy corresponding base
  modified_base (14)..(14): 2'-hydroxy corresponding base
  modified_base (15)..(15): 2'-hydroxy corresponding base
  modified_base (16)..(16): 2'-hydroxy corresponding base
  modified_base (17)..(17): 2'-hydroxy corresponding base
  modified_base (18)..(18): 2'-hydroxy corresponding base
  modified_base (19)..(19): 2'-hydroxy corresponding base
  modified_base (20)..(20): deoxythymidine
  modified_base (21)..(21): 5'-thio thymidine
agagacugauccacuucuctt

SEQ ID NO: 602 - DNA, 21 bp, Artificial Sequence
  Description of Artificial Sequence: Synthetic oligonucleotide
  Description of Combined DNA/RNA Molecule: Synthetic oligonucleotide
  siRNAs to PCSK9
  modified_base (1)..(1): 2'-hydroxy corresponding base
  modified_base (2)..(2): 2'-hydroxy corresponding base
  modified_base (3)..(3): 2'-hydroxy corresponding base
  modified_base (4)..(4): 2'-hydroxy corresponding base
  modified_base (5)..(5): 2'-hydroxy corresponding base
  modified_base (6)..(6): 2'-hydroxy corresponding base
  modified_base (7)..(7): 2'-hydroxy corresponding base
  modified_base (8)..(8): 2'-hydroxy corresponding base
  modified_base (9)..(9): 2'-hydroxy corresponding base
  modified_base (10)..(10): 2'-hydroxy corresponding base
  modified_base (11)..(11): 2'-hydroxy corresponding base
  modified_base (12)..(12): 2'-hydroxy corresponding base
  modified_base (13)..(13): 2'-hydroxy corresponding base
  modified_base (14)..(14): 2'-hydroxy corresponding base
  modified_base (15)..(15): 2'-hydroxy corresponding base
  modified_base (16)..(16): 2'-hydroxy corresponding base
  modified_base (17)..(17): 2'-hydroxy corresponding base
  modified_base (18)..(18): 2'-hydroxy corresponding base
  modified_base (19)..(19): 2'-hydroxy corresponding base
  modified_base (20)..(20): deoxythymidine
  modified_base (21)..(21): 5'-thio thymidine
gagaaguggaucagucucutt

SEQ ID NO: 603 - DNA, 21 bp, Artificial Sequence
  Description of Artificial Sequence: Synthetic oligonucleotide
  Description of Combined DNA/RNA Molecule: Synthetic oligonucleotide
  siRNAs to PCSK9
  modified_base (1)..(1): 2'-hydroxy corresponding base
  modified_base (2)..(2): 2'-hydroxy corresponding base
  modified_base (3)..(3): 2'-hydroxy corresponding base
  modified_base (4)..(4): 2'-hydroxy corresponding base
  modified_base (5)..(5): 2'-hydroxy corresponding base
  modified_base (6)..(6): 2'-O-methyl corresponding base
  modified_base (7)..(7): 2'-O-methyl corresponding base
  modified_base (8)..(8): 2'-hydroxy corresponding base
  modified_base (9)..(9): 2'-hydroxy corresponding base
  modified_base (10)..(10): 2'-O-methyl corresponding base
  modified_base (11)..(11): 2'-O-methyl corresponding base
  modified_base (12)..(12): 2'-O-methyl corresponding base
  modified_base (13)..(13): 2'-hydroxy corresponding base
  modified_base (14)..(14): 2'-O-methyl corresponding base
  modified_base (15)..(15): 2'-O-methyl corresponding base
  modified_base (16)..(16): 2'-O-methyl corresponding base
  modified_base (17)..(17): 2'-O-methyl corresponding base
  modified_base (18)..(18): 2'-O-methyl corresponding base
  modified_base (19)..(19): 2'-O-methyl corresponding base
  modified_base (20)..(20): deoxythymidine
  modified_base (21)..(21): 5'-thio thymidine
agagacugauccacuucuctt

SEQ ID NO: 604 - DNA, 21 bp, Artificial Sequence
  Description of Artificial Sequence: Synthetic oligonucleotide
  Description of Combined DNA/RNA Molecule: Synthetic oligonucleotide
  siRNAs to PCSK9
  modified_base (1)..(1): 2'-hydroxy corresponding base
  modified_base (2)..(2): 2'-hydroxy corresponding base
  modified_base (3)..(3): 2'-hydroxy corresponding base
  modified_base (4)..(4): 2'-hydroxy corresponding base
  modified_base (5)..(5): 2'-hydroxy corresponding base
  modified_base (6)..(6): 2'-hydroxy corresponding base
  modified_base (7)..(7): 2'-hydroxy corresponding base
  modified_base (8)..(8): 2'-hydroxy corresponding base
  modified_base (9)..(9): 2'-hydroxy corresponding base
  modified_base (10)..(10): 2'-hydroxy corresponding base
  modified_base (11)..(11): 2'-hydroxy corresponding base
  modified_base (12)..(12): 2'-O-methyl corresponding base
  modified_base (13)..(13): 2'-hydroxy corresponding base
  modified_base (14)..(14): 2'-hydroxy corresponding base
  modified_base (15)..(15): 2'-hydroxy corresponding base
  modified_base (16)..(16): 2'-hydroxy corresponding base
  modified_base (17)..(17): 2'-hydroxy corresponding base
  modified_base (18)..(18): 2'-hydroxy corresponding base
  modified_base (19)..(19): 2'-hydroxy corresponding base
  modified_base (20)..(20): deoxythymidine
  modified_base (21)..(21): 5'-thio thymidine
gagaaguggaucagucucutt

SEQ ID NO: 605 - DNA, 21 bp, Artificial Sequence
  Description of Artificial Sequence: Synthetic oligonucleotide
  Description of Combined DNA/RNA Molecule: Synthetic oligonucleotide
  siRNAs to PCSK9
  modified_base (1)..(1): 2'-hydroxy corresponding base
  modified_base (2)..(2): 2'-hydroxy corresponding base
  modified_base (3)..(3): 2'-hydroxy corresponding base
  modified_base (4)..(4): 2'-hydroxy corresponding base
  modified_base (5)..(5): 2'-hydroxy corresponding base
  modified_base (6)..(6): 2'-hydroxy corresponding base
  modified_base (7)..(7): 2'-hydroxy corresponding base
  modified_base (8)..(8): 2'-hydroxy corresponding base
  modified_base (9)..(9): 2'-hydroxy corresponding base
  modified_base (10)..(10): 2'-hydroxy corresponding base
  modified_base (11)..(11): 2'-hydroxy corresponding base
  modified_base (12)..(12): 2'-hydroxy corresponding base
  modified_base (13)..(13): 2'-hydroxy corresponding base
  modified_base (14)..(14): 2'-hydroxy corresponding base
  modified_base (15)..(15): 2'-hydroxy corresponding base
  modified_base (16)..(16): 2'-hydroxy corresponding base
  modified_base (17)..(17): 2'-hydroxy corresponding base
  modified_base (18)..(18): 2'-hydroxy corresponding base
  modified_base (19)..(19): 2'-hydroxy corresponding base
  modified_base (20)..(20): deoxythymidine
  modified_base (21)..(21): 5'-thio thymidine
uucucugccaaagaugucatt

SEQ ID NO: 606 - DNA, 21 bp, Artificial Sequence
  Description of Artificial Sequence: Synthetic oligonucleotide
  Description of Combined DNA/RNA Molecule: Synthetic oligonucleotide
  siRNAs to PCSK9
  modified_base (1)..(1): 2'-hydroxy corresponding base
  modified_base (2)..(2): 2'-hydroxy corresponding base
  modified_base (3)..(3): 2'-hydroxy corresponding base
  modified_base (4)..(4): 2'-hydroxy corresponding base
  modified_base (5)..(5): 2'-hydroxy corresponding base
  modified_base (6)..(6): 2'-hydroxy corresponding base
  modified_base (7)..(7): 2'-hydroxy corresponding base
  modified_base (8)..(8): 2'-hydroxy corresponding base
  modified_base (9)..(9): 2'-hydroxy corresponding base
  modified_base (10)..(10): 2'-hydroxy corresponding base
  modified_base (11)..(11): 2'-hydroxy corresponding base
  modified_base (12)..(12): 2'-hydroxy corresponding base
  modified_base (13)..(13): 2'-hydroxy corresponding base
  modified_base (14)..(14): 2'-hydroxy corresponding base
  modified_base (15)..(15): 2'-hydroxy corresponding base
  modified_base (16)..(16): 2'-hydroxy corresponding base
  modified_base (17)..(17): 2'-hydroxy corresponding base
  modified_base (18)..(18): 2'-hydroxy corresponding base
  modified_base (19)..(19): 2'-hydroxy corresponding base
  modified_base (20)..(20): deoxythymidine
  modified_base (21)..(21): 5'-thio thymidine
ugacaucuuuggcagagaatt

SEQ ID NO: 607 - DNA, 21 bp, Artificial Sequence
  Description of Artificial Sequence: Synthetic oligonucleotide
  Description of Combined DNA/RNA Molecule: Synthetic oligonucleotide
  siRNAs to PCSK9
  modified_base (1)..(1): 2'-O-methyl corresponding base
  modified_base (2)..(2): 2'-O-methyl corresponding base
  modified_base (3)..(3): 2'-O-methyl corresponding base
  modified_base (4)..(4): 2'-O-methyl corresponding base
  modified_base (5)..(5): 2'-O-methyl corresponding base
  modified_base (6)..(6): 2'-O-methyl corresponding base
  modified_base (7)..(7): 2'-hydroxy corresponding base
  modified_base (8)..(8): 2'-O-methyl corresponding base
  modified_base (9)..(9): 2'-O-methyl corresponding base
  modified_base (10)..(10): 2'-hydroxy corresponding base
  modified_base (11)..(11): 2'-hydroxy corresponding base
  modified_base (12)..(12): 2'-hydroxy corresponding base
  modified_base (13)..(13): 2'-hydroxy corresponding base
  modified_base (14)..(14): 2'-hydroxy corresponding base
  modified_base (15)..(15): 2'-O-methyl corresponding base
  modified_base (16)..(16): 2'-hydroxy corresponding base
  modified_base (17)..(17): 2'-O-methyl corresponding base
  modified_base (18)..(18): 2'-O-methyl corresponding base
  modified_base (19)..(19): 2'-hydroxy corresponding base
  modified_base (20)..(20): deoxythymidine
  modified_base (21)..(21): 5'-thio thymidine
uucucugccaaagaugucatt

SEQ ID NO: 608 - DNA, 21 bp, Artificial Sequence
  Description of Artificial Sequence: Synthetic oligonucleotide
  Description of Combined DNA/RNA Molecule: Synthetic oligonucleotide
  siRNAs to PCSK9
  modified_base (1)..(1): 2'-hydroxy corresponding base
  modified_base (2)..(2): 2'-hydroxy corresponding base
  modified_base (3)..(3): 2'-hydroxy corresponding base
  modified_base (4)..(4): 2'-O-methyl corresponding base
  modified_base (5)..(5): 2'-hydroxy corresponding base
  modified_base (6)..(6): 2'-hydroxy corresponding base
  modified_base (7)..(7): 2'-hydroxy corresponding base
  modified_base (8)..(8): 2'-hydroxy corresponding base
  modified_base (9)..(9): 2'-hydroxy corresponding base
  modified_base (10)..(10): 2'-hydroxy corresponding base
  modified_base (11)..(11): 2'-hydroxy corresponding base
  modified_base (12)..(12): 2'-hydroxy corresponding base
  modified_base (13)..(13): 2'-O-methyl corresponding base
  modified_base (14)..(14): 2'-hydroxy corresponding base
  modified_base (15)..(15): 2'-hydroxy corresponding base
  modified_base (16)..(16): 2'-hydroxy corresponding base
  modified_base (17)..(17): 2'-hydroxy corresponding base
  modified_base (18)..(18): 2'-hydroxy corresponding base
  modified_base (19)..(19): 2'-hydroxy corresponding base
  modified_base (20)..(20): deoxythymidine
  modified_base (21)..(21): 5'-thio thymidine
ugacaucuuuggcagagaatt

SEQ ID NO: 609 - DNA, 21 bp, Artificial Sequence
  Description of Artificial Sequence: Synthetic oligonucleotide
  Description of Combined DNA/RNA Molecule: Synthetic oligonucleotide
  siRNAs to PCSK9
  modified_base (1)..(1): 2'-hydroxy corresponding base
  modified_base (2)..(2): 2'-hydroxy corresponding base
  modified_base (3)..(3): 2'-hydroxy corresponding base
  modified_base (4)..(4): 2'-hydroxy corresponding base
  modified_base (5)..(5): 2'-hydroxy corresponding base
  modified_base (6)..(6): 2'-hydroxy corresponding base
  modified_base (7)..(7): 2'-hydroxy corresponding base
  modified_base (8)..(8): 2'-hydroxy corresponding base
  modified_base (9)..(9): 2'-hydroxy corresponding base
  modified_base (10)..(10): 2'-hydroxy corresponding base
  modified_base (11)..(11): 2'-hydroxy corresponding base
  modified_base (12)..(12): 2'-hydroxy corresponding base
  modified_base (13)..(13): 2'-hydroxy corresponding base
  modified_base (14)..(14): 2'-hydroxy corresponding base
  modified_base (15)..(15): 2'-hydroxy corresponding base
  modified_base (16)..(16): 2'-hydroxy corresponding base
  modified_base (17)..(17): 2'-hydroxy corresponding base
  modified_base (18)..(18): 2'-hydroxy corresponding base
  modified_base (19)..(19): 2'-hydroxy corresponding base
  modified_base (20)..(20): deoxythymidine
  modified_base (21)..(21): 5'-thio thymidine
cucugccaaagaugucauctt

SEQ ID NO: 610 - DNA, 21 bp, Artificial Sequence
  Description of Artificial Sequence: Synthetic oligonucleotide
  Description of Combined DNA/RNA Molecule: Synthetic oligonucleotide
  siRNAs to PCSK9
  modified_base (1)..(1): 2'-hydroxy corresponding base
  modified_base (2)..(2): 2'-hydroxy corresponding base
  modified_base (3)..(3): 2'-hydroxy corresponding base
  modified_base (4)..(4): 2'-hydroxy corresponding base
  modified_base (5)..(5): 2'-hydroxy corresponding base
  modified_base (6)..(6): 2'-hydroxy corresponding base
  modified_base (7)..(7): 2'-hydroxy corresponding base
  modified_base (8)..(8): 2'-hydroxy corresponding base
  modified_base (9)..(9): 2'-hydroxy corresponding base
  modified_base (10)..(10): 2'-hydroxy corresponding base
  modified_base (11)..(11): 2'-hydroxy corresponding base
  modified_base (12)..(12): 2'-hydroxy corresponding base
  modified_base (13)..(13): 2'-hydroxy corresponding base
  modified_base (14)..(14): 2'-hydroxy corresponding base
  modified_base (15)..(15): 2'-hydroxy corresponding base
  modified_base (16)..(16): 2'-hydroxy corresponding base
  modified_base (17)..(17): 2'-hydroxy corresponding base
  modified_base (18)..(18): 2'-hydroxy corresponding base
  modified_base (19)..(19): 2'-hydroxy corresponding base
  modified_base (20)..(20): deoxythymidine
  modified_base (21)..(21): 5'-thio thymidine
gaugacaucuuuggcagagtt

SEQ ID NO: 611 - DNA, 21 bp, Artificial Sequence
  Description of Artificial Sequence: Synthetic oligonucleotide
  Description of Combined DNA/RNA Molecule: Synthetic oligonucleotide
  siRNAs to PCSK9
  modified_base (1)..(1): 2'-O-methyl corresponding base
  modified_base (2)..(2): 2'-O-methyl corresponding base
  modified_base (3)..(3): 2'-O-methyl corresponding base
  modified_base (4)..(4): 2'-O-methyl corresponding base
  modified_base (5)..(5): 2'-hydroxy corresponding base
  modified_base (6)..(6): 2'-O-methyl corresponding base
  modified_base (7)..(7): 2'-O-methyl corresponding base
  modified_base (8)..(8): 2'-hydroxy corresponding base
  modified_base (9)..(9): 2'-hydroxy corresponding base
  modified_base (10)..(10): 2'-hydroxy corresponding base
  modified_base (11)..(11): 2'-hydroxy corresponding base
  modified_base (12)..(12): 2'-hydroxy corresponding base
  modified_base (13)..(13): 2'-O-methyl corresponding base
  modified_base (14)..(14): 2'-hydroxy corresponding base
  modified_base (15)..(15): 2'-O-methyl corresponding base
  modified_base (16)..(16): 2'-O-methyl corresponding base
  modified_base (17)..(17): 2'-hydroxy corresponding base
  modified_base (18)..(18): 2'-O-methyl corresponding base
  modified_base (19)..(19): 2'-O-methyl corresponding base
  modified_base (20)..(20): deoxythymidine
  modified_base (21)..(21): 5'-thio thymidine
cucugccaaagaugucauctt

SEQ ID NO: 612 - DNA, 21 bp, Artificial Sequence
  Description of Artificial Sequence: Synthetic oligonucleotide
  Description of Combined DNA/RNA Molecule: Synthetic oligonucleotide
  siRNAs to PCSK9
  modified_base (1)..(1): 2'-hydroxy corresponding base
  modified_base (2)..(2): 2'-hydroxy corresponding base
  modified_base (3)..(3): 2'-hydroxy corresponding base
  modified_base (4)..(4): 2'-hydroxy corresponding base
  modified_base (5)..(5): 2'-hydroxy corresponding base
  modified_base (6)..(6): 2'-O-methyl corresponding base
  modified_base (7)..(7): 2'-hydroxy corresponding base
  modified_base (8)..(8): 2'-hydroxy corresponding base
  modified_base (9)..(9): 2'-hydroxy corresponding base
  modified_base (10)..(10): 2'-hydroxy corresponding base
  modified_base (11)..(11): 2'-hydroxy corresponding base
  modified_base (12)..(12): 2'-hydroxy corresponding base
  modified_base (13)..(13): 2'-hydroxy corresponding base
  modified_base (14)..(14): 2'-hydroxy corresponding base
  modified_base (15)..(15): 2'-O-methyl corresponding base
  modified_base (16)..(16): 2'-hydroxy corresponding base
  modified_base (17)..(17): 2'-hydroxy corresponding base
  modified_base (18)..(18): 2'-hydroxy corresponding base
  modified_base (19)..(19): 2'-hydroxy corresponding base
  modified_base (20)..(20): deoxythymidine
  modified_base (21)..(21): 5'-thio thymidine
gaugacaucuuuggcagagtt

SEQ ID NO: 613 - DNA, 21 bp, Artificial Sequence
  Description of Artificial Sequence: Synthetic oligonucleotide
  Description of Combined DNA/RNA Molecule: Synthetic oligonucleotide
  siRNAs to PCSK9
  modified_base (1)..(1): 2'-hydroxy corresponding base
  modified_base (2)..(2): 2'-hydroxy corresponding base
  modified_base (3)..(3): 2'-hydroxy corresponding base
  modified_base (4)..(4): 2'-hydroxy corresponding base
  modified_base (5)..(5): 2'-hydroxy corresponding base
  modified_base (6)..(6): 2'-hydroxy corresponding base
  modified_base (7)..(7): 2'-hydroxy corresponding base
  modified_base (8)..(8): 2'-hydroxy corresponding base
  modified_base (9)..(9): 2'-hydroxy corresponding base
  modified_base (10)..(10): 2'-hydroxy corresponding base
  modified_base (11)..(11): 2'-hydroxy corresponding base
  modified_base (12)..(12): 2'-hydroxy corresponding base
  modified_base (13)..(13): 2'-hydroxy corresponding base
  modified_base (14)..(14): 2'-hydroxy corresponding base
  modified_base (15)..(15): 2'-hydroxy corresponding base
  modified_base (16)..(16): 2'-hydroxy corresponding base
  modified_base (17)..(17): 2'-hydroxy corresponding base
  modified_base (18)..(18): 2'-hydroxy corresponding base
  modified_base (19)..(19): 2'-hydroxy corresponding base
  modified_base (20)..(20): deoxythymidine
  modified_base (21)..(21): 5'-thio thymidine
cugaggaccagcggguacutt

SEQ ID NO: 614 - DNA, 21 bp, Artificial Sequence
  Description of Artificial Sequence: Synthetic oligonucleotide
  Description of Combined DNA/RNA Molecule: Synthetic oligonucleotide
  siRNAs to PCSK9
  modified_base (1)..(1): 2'-hydroxy corresponding base
  modified_base (2)..(2): 2'-hydroxy corresponding base
  modified_base (3)..(3): 2'-hydroxy corresponding base
  modified_base (4)..(4): 2'-hydroxy corresponding base
  modified_base (5)..(5): 2'-hydroxy corresponding base
  modified_base (6)..(6): 2'-hydroxy corresponding base
  modified_base (7)..(7): 2'-hydroxy corresponding base
  modified_base (8)..(8): 2'-hydroxy corresponding base
  modified_base (9)..(9): 2'-hydroxy corresponding base
  modified_base (10)..(10): 2'-hydroxy corresponding base
  modified_base (11)..(11): 2'-hydroxy corresponding base
  modified_base (12)..(12): 2'-hydroxy corresponding base
  modified_base (13)..(13): 2'-hydroxy corresponding base
  modified_base (14)..(14): 2'-hydroxy corresponding base
  modified_base (15)..(15): 2'-hydroxy corresponding base
  modified_base (16)..(16): 2'-hydroxy corresponding base
  modified_base (17)..(17): 2'-hydroxy corresponding base
  modified_base (18)..(18): 2'-hydroxy corresponding base
  modified_base (19)..(19): 2'-hydroxy corresponding base
  modified_base (20)..(20): deoxythymidine
  modified_base (21)..(21): 5'-thio thymidine
aguacccgcugguccucagtt

SEQ ID NO: 615 - DNA, 21 bp, Artificial Sequence
  Description of Artificial Sequence: Synthetic oligonucleotide
  Description of Combined DNA/RNA Molecule: Synthetic oligonucleotide
  siRNAs to PCSK9
  modified_base (1)..(1): 2'-O-methyl corresponding base
  modified_base (2)..(2): 2'-O-methyl corresponding base
  modified_base (3)..(3): 2'-hydroxy corresponding base
  modified_base (4)..(4): 2'-hydroxy corresponding base
  modified_base (5)..(5): 2'-hydroxy corresponding base
  modified_base (6)..(6): 2'-hydroxy corresponding base
  modified_base (7)..(7): 2'-hydroxy corresponding base
  modified_base (8)..(8): 2'-O-methyl corresponding base
  modified_base (9)..(9): 2'-O-methyl corresponding base
  modified_base (10)..(10): 2'-hydroxy corresponding base
  modified_base (11)..(11): 2'-hydroxy corresponding base
  modified_base (12)..(12): 2'-O-methyl corresponding base
  modified_base (13)..(13): 2'-hydroxy corresponding base
  modified_base (14)..(14): 2'-hydroxy corresponding base
  modified_base (15)..(15): 2'-hydroxy corresponding base
  modified_base (16)..(16): 2'-O-methyl corresponding base
  modified_base (17)..(17): 2'-hydroxy corresponding base
  modified_base (18)..(18): 2'-O-methyl corresponding base
  modified_base (19)..(19): 2'-O-methyl corresponding base
  modified_base (20)..(20): deoxythymidine
  modified_base (21)..(21): 5'-thio thymidine
cugaggaccagcggguacutt

SEQ ID NO: 616 - DNA, 21 bp, Artificial Sequence
  Description of Artificial Sequence: Synthetic oligonucleotide
  Description of Combined DNA/RNA Molecule: Synthetic oligonucleotide
  siRNAs to PCSK9
  modified_base (1)..(1): 2'-hydroxy corresponding base
  modified_base (2)..(2): 2'-hydroxy corresponding base
  modified_base (3)..(3): 2'-O-methyl corresponding base
  modified_base (4)..(4): 2'-hydroxy corresponding base
  modified_base (5)..(5): 2'-hydroxy corresponding base
  modified_base (6)..(6): 2'-hydroxy corresponding base
  modified_base (7)..(7): 2'-hydroxy corresponding base
  modified_base (8)..(8): 2'-hydroxy corresponding base
  modified_base (9)..(9): 2'-hydroxy corresponding base
  modified_base (10)..(10): 2'-hydroxy corresponding base
  modified_base (11)..(11): 2'-hydroxy corresponding base
  modified_base (12)..(12): 2'-hydroxy corresponding base
  modified_base (13)..(13): 2'-hydroxy corresponding base
  modified_base (14)..(14): 2'-hydroxy corresponding base
  modified_base (15)..(15): 2'-hydroxy corresponding base
  modified_base (16)..(16): 2'-hydroxy corresponding base
  modified_base (17)..(17): 2'-O-methyl corresponding base
  modified_base (18)..(18): 2'-hydroxy corresponding base
  modified_base (19)..(19): 2'-hydroxy corresponding base
  modified_base (20)..(20): deoxythymidine
  modified_base (21)..(21): 5'-thio thymidine
aguacccgcugguccucagtt

SEQ ID NO: 617 - DNA, 21 bp, Artificial Sequence
  Description of Artificial Sequence: Synthetic oligonucleotide
  Description of Combined DNA/RNA Molecule: Synthetic oligonucleotide
  siRNAs to PCSK9
  modified_base (1)..(1): 2'-hydroxy corresponding base
  modified_base (2)..(2): 2'-hydroxy corresponding base
  modified_base (3)..(3): 2'-hydroxy corresponding base
  modified_base (4)..(4): 2'-hydroxy corresponding base
  modified_base (5)..(5): 2'-hydroxy corresponding base
  modified_base (6)..(6): 2'-hydroxy corresponding base
  modified_base (7)..(7): 2'-hydroxy corresponding base
  modified_base (8)..(8): 2'-hydroxy corresponding base
  modified_base (9)..(9): 2'-hydroxy corresponding base
  modified_base (10)..(10): 2'-hydroxy corresponding base
  modified_base (11)..(11): 2'-hydroxy corresponding base
  modified_base (12)..(12): 2'-hydroxy corresponding base
  modified_base (13)..(13): 2'-hydroxy corresponding base
  modified_base (14)..(14): 2'-hydroxy corresponding base
  modified_base (15)..(15): 2'-hydroxy corresponding base
  modified_base (16)..(16): 2'-hydroxy corresponding base
  modified_base (17)..(17): 2'-hydroxy corresponding base
  modified_base (18)..(18): 2'-hydroxy corresponding base
  modified_base (19)..(19): 2'-hydroxy corresponding base
  modified_base (20)..(20): deoxythymidine
  modified_base (21)..(21): 5'-thio thymidine
ugaggaccagcggguacugtt

SEQ ID NO: 618 - DNA, 21 bp, Artificial Sequence
  Description of Artificial Sequence: Synthetic oligonucleotide
  Description of Combined DNA/RNA Molecule: Synthetic oligonucleotide
  siRNAs to PCSK9
  modified_base (1)..(1): 2'-hydroxy corresponding base
  modified_base (2)..(2): 2'-hydroxy corresponding base
  modified_base (3)..(3): 2'-hydroxy corresponding base
  modified_base (4)..(4): 2'-hydroxy corresponding base
  modified_base (5)..(5): 2'-hydroxy corresponding base
  modified_base (6)..(6): 2'-hydroxy corresponding base
  modified_base (7)..(7): 2'-hydroxy corresponding base
  modified_base (8)..(8): 2'-hydroxy corresponding base
  modified_base (9)..(9): 2'-hydroxy corresponding base
  modified_base (10)..(10): 2'-hydroxy corresponding base
  modified_base (11)..(11): 2'-hydroxy corresponding base
  modified_base (12)..(12): 2'-hydroxy corresponding base
  modified_base (13)..(13): 2'-hydroxy corresponding base
  modified_base (14)..(14): 2'-hydroxy corresponding base
  modified_base (15)..(15): 2'-hydroxy corresponding base
  modified_base (16)..(16): 2'-hydroxy corresponding base
  modified_base (17)..(17): 2'-hydroxy corresponding base
  modified_base (18)..(18): 2'-hydroxy corresponding base
  modified_base (19)..(19): 2'-hydroxy corresponding base
  modified_base (20)..(20): deoxythymidine
  modified_base (21)..(21): 5'-thio thymidine
caguacccgcugguccucatt

SEQ ID NO: 619 - DNA, 21 bp, Artificial Sequence
  Description of Artificial Sequence: Synthetic oligonucleotide
  Description of Combined DNA/RNA Molecule: Synthetic oligonucleotide
  siRNAs to PCSK9
  modified_base (1)..(1): 2'-O-methyl corresponding base
  modified_base (2)..(2): 2'-hydroxy corresponding base
  modified_base (3)..(3): 2'-hydroxy corresponding base
  modified_base (4)..(4): 2'-hydroxy corresponding base
  modified_base (5)..(5): 2'-hydroxy corresponding base
  modified_base (6)..(6): 2'-hydroxy corresponding base
  modified_base (7)..(7): 2'-O-methyl corresponding base
  modified_base (8)..(8): 2'-O-methyl corresponding base
  modified_base (9)..(9): 2'-hydroxy corresponding base
  modified_base (10)..(10): 2'-hydroxy corresponding base
  modified_base (11)..(11): 2'-O-methyl corresponding base
  modified_base (12)..(12): 2'-hydroxy corresponding base
  modified_base (13)..(13): 2'-hydroxy corresponding base
  modified_base (14)..(14): 2'-hydroxy corresponding base
  modified_base (15)..(15): 2'-O-methyl corresponding base
  modified_base (16)..(16): 2'-hydroxy corresponding base
  modified_base (17)..(17): 2'-O-methyl corresponding base
  modified_base (18)..(18): 2'-O-methyl corresponding base
  modified_base (19)..(19): 2'-hydroxy corresponding base
  modified_base (20)..(20): deoxythymidine
  modified_base (21)..(21): 5'-thio thymidine
ugaggaccagcggguacugtt

SEQ ID NO: 620 - DNA, 21 bp, Artificial Sequence
  Description of Artificial Sequence: Synthetic oligonucleotide
  Description of Combined DNA/RNA Molecule: Synthetic oligonucleotide
  siRNAs to PCSK9
  modified_base (1)..(1): 2'-O-methyl corresponding base
  modified_base (2)..(2): 2'-hydroxy corresponding base
  modified_base (3)..(3): 2'-hydroxy corresponding base
  modified_base (4)..(4): 2'-O-methyl corresponding base
  modified_base (5)..(5): 2'-hydroxy corresponding base
  modified_base (6)..(6): 2'-hydroxy corresponding base
  modified_base (7)..(7): 2'-hydroxy corresponding base
  modified_base (8)..(8): 2'-hydroxy corresponding base
  modified_base (9)..(9): 2'-hydroxy corresponding base
  modified_base (10)..(10): 2'-hydroxy corresponding base
  modified_base (11)..(11): 2'-hydroxy corresponding base
  modified_base (12)..(12): 2'-hydroxy corresponding base
  modified_base (13)..(13): 2'-hydroxy corresponding base
  modified_base (14)..(14): 2'-hydroxy corresponding base
  modified_base (15)..(15): 2'-hydroxy corresponding base
  modified_base (16)..(16): 2'-hydroxy corresponding base
  modified_base (17)..(17): 2'-hydroxy corresponding base
  modified_base (18)..(18): 2'-O-methyl corresponding base
  modified_base (19)..(19): 2'-hydroxy corresponding base
  modified_base (20)..(20): deoxythymidine
  modified_base (21)..(21): 5'-thio thymidine
caguacccgcugguccucatt

SEQ ID NO: 621 - DNA, 21 bp, Artificial Sequence
  Description of Artificial Sequence: Synthetic oligonucleotide
  Description of Combined DNA/RNA Molecule: Synthetic oligonucleotide
  siRNAs to PCSK9
  modified_base (1)..(1): 2'-hydroxy corresponding base
  modified_base (2)..(2): 2'-hydroxy corresponding base
  modified_base (3)..(3): 2'-hydroxy corresponding base
  modified_base (4)..(4): 2'-hydroxy corresponding base
  modified_base (5)..(5): 2'-hydroxy corresponding base
  modified_base (6)..(6): 2'-hydroxy corresponding base
  modified_base (7)..(7): 2'-hydroxy corresponding base
  modified_base (8)..(8): 2'-hydroxy corresponding base
  modified_base (9)..(9): 2'-hydroxy corresponding base
  modified_base (10)..(10): 2'-hydroxy corresponding base
  modified_base (11)..(11): 2'-hydroxy corresponding base
  modified_base (12)..(12): 2'-hydroxy corresponding base
  modified_base (13)..(13): 2'-hydroxy corresponding base
  modified_base (14)..(14): 2'-hydroxy corresponding base
  modified_base (15)..(15): 2'-hydroxy corresponding base
  modified_base (16)..(16): 2'-hydroxy corresponding base
  modified_base (17)..(17): 2'-hydroxy corresponding base
  modified_base (18)..(18): 2'-hydroxy corresponding base
  modified_base (19)..(19): 2'-hydroxy corresponding base
  modified_base (20)..(20): deoxythymidine
  modified_base (21)..(21): deoxythymidine
acuguauggucagcacacutt

SEQ ID NO: 622 - DNA, 21 bp, Artificial Sequence
  Description of Artificial Sequence: Synthetic oligonucleotide
  Description of Combined DNA/RNA Molecule: Synthetic oligonucleotide
  siRNAs to PCSK9
  modified_base (1)..(1): 2'-hydroxy corresponding base
  modified_base (2)..(2): 2'-hydroxy corresponding base
  modified_base (3)..(3): 2'-hydroxy corresponding base
  modified_base (4)..(4): 2'-hydroxy corresponding base
  modified_base (5)..(5): 2'-hydroxy corresponding base
  modified_base (6)..(6): 2'-hydroxy corresponding base
  modified_base (7)..(7): 2'-hydroxy corresponding base
  modified_base (8)..(8): 2'-hydroxy corresponding base
  modified_base (9)..(9): 2'-hydroxy corresponding base
  modified_base (10)..(10): 2'-hydroxy corresponding base
  modified_base (11)..(11): 2'-hydroxy corresponding base
  modified_base (12)..(12): 2'-hydroxy corresponding base
  modified_base (13)..(13): 2'-hydroxy corresponding base
  modified_base (14)..(14): 2'-hydroxy corresponding base
  modified_base (15)..(15): 2'-hydroxy corresponding base
  modified_base (16)..(16): 2'-hydroxy corresponding base
  modified_base (17)..(17): 2'-hydroxy corresponding base
  modified_base (18)..(18): 2'-hydroxy corresponding base
  modified_base (19)..(19): 2'-hydroxy corresponding base
  modified_base (20)..(20): deoxythymidine
  modified_base (21)..(21): deoxythymidine
agugugcugaccauacagutt

SEQ ID NO: 623 - DNA, 21 bp, Artificial Sequence
  Description of Artificial Sequence: Synthetic oligonucleotide
  Description of Combined DNA/RNA Molecule: Synthetic oligonucleotide
  siRNAs to PCSK9
  modified_base (1)..(1): 2'-hydroxy corresponding base
  modified_base (2)..(2): 2'-hydroxy corresponding base
  modified_base (3)..(3): 2'-hydroxy corresponding base
  modified_base (4)..(4): 2'-hydroxy corresponding base
  modified_base (5)..(5): 2'-hydroxy corresponding base
  modified_base (6)..(6): 2'-hydroxy corresponding base
  modified_base (7)..(7): 2'-hydroxy corresponding base
  modified_base (8)..(8): 2'-hydroxy corresponding base
  modified_base (9)..(9): 2'-hydroxy corresponding base
  modified_base (10)..(10): 2'-hydroxy corresponding base
  modified_base (11)..(11): 2'-hydroxy corresponding base
  modified_base (12)..(12): 2'-hydroxy corresponding base
  modified_base (13)..(13): 2'-hydroxy corresponding base
  modified_base (14)..(14): 2'-hydroxy corresponding base
  modified_base (15)..(15): 2'-hydroxy corresponding base
  modified_base (16)..(16): 2'-hydroxy corresponding base
  modified_base (17)..(17): 2'-hydroxy corresponding base
  modified_base (18)..(18): 2'-hydroxy corresponding base
  modified_base (19)..(19): 2'-hydroxy corresponding base
  modified_base (20)..(20): deoxythymidine
  modified_base (21)..(21): deoxythymidine
uguauggucagcacacucgtt

SEQ ID NO: 624 - DNA, 21 bp, Artificial Sequence
  Description of Artificial Sequence: Synthetic oligonucleotide
  Description of Combined DNA/RNA Molecule: Synthetic oligonucleotide
  siRNAs to PCSK9
  modified_base (1)..(1): 2'-hydroxy corresponding base
  modified_base (2)..(2): 2'-hydroxy corresponding base
  modified_base (3)..(3): 2'-hydroxy corresponding base
  modified_base (4)..(4): 2'-hydroxy corresponding base
  modified_base (5)..(5): 2'-hydroxy corresponding base
  modified_base (6)..(6): 2'-hydroxy corresponding base
  modified_base (7)..(7): 2'-hydroxy corresponding base
  modified_base (8)..(8): 2'-hydroxy corresponding base
  modified_base (9)..(9): 2'-hydroxy corresponding base
  modified_base (10)..(10): 2'-hydroxy corresponding base
  modified_base (11)..(11): 2'-hydroxy corresponding base
  modified_base (12)..(12): 2'-hydroxy corresponding base
  modified_base (13)..(13): 2'-hydroxy corresponding base
  modified_base (14)..(14): 2'-hydroxy corresponding base
  modified_base (15)..(15): 2'-hydroxy corresponding base
  modified_base (16)..(16): 2'-hydroxy corresponding base
  modified_base (17)..(17): 2'-hydroxy corresponding base
  modified_base (18)..(18): 2'-hydroxy corresponding base
  modified_base (19)..(19): 2'-hydroxy corresponding base
  modified_base (20)..(20): deoxythymidine
  modified_base (21)..(21): deoxythymidine
cgagugugcugaccauacatt

SEQ ID NO: 625 - DNA, 21 bp, Artificial Sequence
  Description of Artificial Sequence: Synthetic oligonucleotide
  Description of Combined DNA/RNA Molecule: Synthetic oligonucleotide
  siRNAs to PCSK9
  modified_base (1)..(1): 2'-hydroxy corresponding base
  modified_base (2)..(2): 2'-hydroxy corresponding base
  modified_base (3)..(3): 2'-hydroxy corresponding base
  modified_base (4)..(4): 2'-hydroxy corresponding base
  modified_base (5)..(5): 2'-hydroxy corresponding base
  modified_base (6)..(6): 2'-hydroxy corresponding base
  modified_base (7)..(7): 2'-hydroxy corresponding base
  modified_base (8)..(8): 2'-hydroxy corresponding base
  modified_base (9)..(9): 2'-hydroxy corresponding base
  modified_base (10)..(10): 2'-hydroxy corresponding base
  modified_base (11)..(11): 2'-hydroxy corresponding base
  modified_base (12)..(12): 2'-hydroxy corresponding base
  modified_base (13)..(13): 2'-hydroxy corresponding base
  modified_base (14)..(14): 2'-hydroxy corresponding base
  modified_base (15)..(15): 2'-hydroxy corresponding base
  modified_base (16)..(16): 2'-hydroxy corresponding base
  modified_base (17)..(17): 2'-hydroxy corresponding base
  modified_base (18)..(18): 2'-hydroxy corresponding base
  modified_base (19)..(19): 2'-hydroxy corresponding base
  modified_base (20)..(20): deoxythymidine
  modified_base (21)..(21): deoxythymidine
guauggucagcacacucggtt

SEQ ID NO: 626 - DNA, 21 bp, Artificial Sequence
  Description of Artificial Sequence: Synthetic oligonucleotide
  Description of Combined DNA/RNA Molecule: Synthetic oligonucleotide
  siRNAs to PCSK9
  modified_base (1)..(1): 2'-hydroxy corresponding base
  modified_base (2)..(2): 2'-hydroxy corresponding base
  modified_base (3)..(3): 2'-hydroxy corresponding base
  modified_base (4)..(4): 2'-hydroxy corresponding base
  modified_base (5)..(5): 2'-hydroxy corresponding base
  modified_base (6)..(6): 2'-hydroxy corresponding base
  modified_base (7)..(7): 2'-hydroxy corresponding base
  modified_base (8)..(8): 2'-hydroxy corresponding base
  modified_base (9)..(9): 2'-hydroxy corresponding base
  modified_base (10)..(10): 2'-hydroxy corresponding base
  modified_base (11)..(11): 2'-hydroxy corresponding base
  modified_base (12)..(12): 2'-hydroxy corresponding base
  modified_base (13)..(13): 2'-hydroxy corresponding base
  modified_base (14)..(14): 2'-hydroxy corresponding base
  modified_base (15)..(15): 2'-hydroxy corresponding base
  modified_base (16)..(16): 2'-hydroxy corresponding base
  modified_base (17)..(17): 2'-hydroxy corresponding base
  modified_base (18)..(18): 2'-hydroxy corresponding base
  modified_base (19)..(19): 2'-hydroxy corresponding base
  modified_base (20)..(20): deoxythymidine
  modified_base (21)..(21): deoxythymidine
ccgagugugcugaccauactt

SEQ ID NO: 627 - DNA, 21 bp, Artificial Sequence
  Description of Artificial Sequence: Synthetic oligonucleotide
  Description of Combined DNA/RNA Molecule: Synthetic oligonucleotide
  siRNAs to PCSK9
  modified_base (1)..(1): 2'-hydroxy corresponding base
  modified_base (2)..(2): 2'-hydroxy corresponding base
  modified_base (3)..(3): 2'-hydroxy corresponding base
  modified_base (4)..(4): 2'-hydroxy corresponding base
  modified_base (5)..(5): 2'-hydroxy corresponding base
  modified_base (6)..(6): 2'-hydroxy corresponding base
  modified_base (7)..(7): 2'-hydroxy corresponding base
  modified_base (8)..(8): 2'-hydroxy corresponding base
  modified_base (9)..(9): 2'-hydroxy corresponding base
  modified_base (10)..(10): 2'-hydroxy corresponding base
  modified_base (11)..(11): 2'-hydroxy corresponding base
  modified_base (12)..(12): 2'-hydroxy corresponding base
  modified_base (13)..(13): 2'-hydroxy corresponding base
  modified_base (14)..(14): 2'-hydroxy corresponding base
  modified_base (15)..(15): 2'-hydroxy corresponding base
  modified_base (16)..(16): 2'-hydroxy corresponding base
  modified_base (17)..(17): 2'-hydroxy corresponding base
  modified_base (18)..(18): 2'-hydroxy corresponding base
  modified_base (19)..(19): 2'-hydroxy corresponding base
  modified_base (20)..(20): deoxythymidine
  modified_base (21)..(21): deoxythymidine
ggauggccacagccgucgctt

SEQ ID NO: 628 - DNA, 21 bp, Artificial Sequence
  Description of Artificial Sequence: Synthetic oligonucleotide
  Description of Combined DNA/RNA Molecule: Synthetic oligonucleotide
  siRNAs to PCSK9
  modified_base (1)..(1): 2'-hydroxy corresponding base
  modified_base (2)..(2): 2'-hydroxy corresponding base
  modified_base (3)..(3): 2'-hydroxy corresponding base
  modified_base (4)..(4): 2'-hydroxy corresponding base
  modified_base (5)..(5): 2'-hydroxy corresponding base
  modified_base (6)..(6): 2'-hydroxy corresponding base
  modified_base (7)..(7): 2'-hydroxy corresponding base
  modified_base (8)..(8): 2'-hydroxy corresponding base
  modified_base (9)..(9): 2'-hydroxy corresponding base
  modified_base (10)..(10): 2'-hydroxy corresponding base
  modified_base (11)..(11): 2'-hydroxy corresponding base
  modified_base (12)..(12): 2'-hydroxy corresponding base
  modified_base (13)..(13): 2'-hydroxy corresponding base
  modified_base (14)..(14): 2'-hydroxy corresponding base
  modified_base (15)..(15): 2'-hydroxy corresponding base
  modified_base (16)..(16): 2'-hydroxy corresponding base
  modified_base (17)..(17): 2'-hydroxy corresponding base
  modified_base (18)..(18): 2'-hydroxy corresponding base
  modified_base (19)..(19): 2'-hydroxy corresponding base
  modified_base (20)..(20): deoxythymidine
  modified_base (21)..(21): deoxythymidine
gcgacggcuguggccaucctt

SEQ ID NO: 629 - DNA, 21 bp, Artificial Sequence
  Description of Artificial Sequence: Synthetic oligonucleotide
  Description of Combined DNA/RNA Molecule: Synthetic oligonucleotide
  siRNAs to PCSK9
  modified_base (1)..(1): 2'-hydroxy corresponding base
  modified_base (2)..(2): 2'-hydroxy corresponding base
  modified_base (3)..(3): 2'-hydroxy corresponding base
  modified_base (4)..(4): 2'-hydroxy corresponding base
  modified_base (5)..(5): 2'-hydroxy corresponding base
  modified_base (6)..(6): 2'-hydroxy corresponding base
  modified_base (7)..(7): 2'-hydroxy corresponding base
  modified_base (8)..(8): 2'-hydroxy corresponding base
  modified_base (9)..(9): 2'-hydroxy corresponding base
  modified_base (10)..(10): 2'-hydroxy corresponding base
  modified_base (11)..(11): 2'-hydroxy corresponding base
  modified_base (12)..(12): 2'-hydroxy corresponding base
  modified_base (13)..(13): 2'-hydroxy corresponding base
  modified_base (14)..(14): 2'-hydroxy corresponding base
  modified_base (15)..(15): 2'-hydroxy corresponding base
  modified_base (16)..(16): 2'-hydroxy corresponding base
  modified_base (17)..(17): 2'-hydroxy corresponding base
  modified_base (18)..(18): 2'-hydroxy corresponding base
  modified_base (19)..(19): 2'-hydroxy corresponding base
  modified_base (20)..(20): deoxythymidine
  modified_base (21)..(21): deoxythymidine
gauggccacagccgucgcctt

SEQ ID NO: 630 - DNA, 21 bp, Artificial Sequence
  Description of Artificial Sequence: Synthetic oligonucleotide
  Description of Combined DNA/RNA Molecule: Synthetic oligonucleotide
  siRNAs to PCSK9
  modified_base (1)..(1): 2'-hydroxy corresponding base
  modified_base (2)..(2): 2'-hydroxy corresponding base
  modified_base (3)..(3): 2'-hydroxy corresponding base
  modified_base (4)..(4): 2'-hydroxy corresponding base
  modified_base (5)..(5): 2'-hydroxy corresponding base
  modified_base (6)..(6): 2'-hydroxy corresponding base
  modified_base (7)..(7): 2'-hydroxy corresponding base
  modified_base (8)..(8): 2'-hydroxy corresponding base
  modified_base (9)..(9): 2'-hydroxy corresponding base
  modified_base (10)..(10): 2'-hydroxy corresponding base
  modified_base (11)..(11): 2'-hydroxy corresponding base
  modified_base (12)..(12): 2'-hydroxy corresponding base
  modified_base (13)..(13): 2'-hydroxy corresponding base
  modified_base (14)..(14): 2'-hydroxy corresponding base
  modified_base (15)..(15): 2'-hydroxy corresponding base
  modified_base (16)..(16): 2'-hydroxy corresponding base
  modified_base (17)..(17): 2'-hydroxy corresponding base
  modified_base (18)..(18): 2'-hydroxy corresponding base
  modified_base (19)..(19): 2'-hydroxy corresponding base
  modified_base (20)..(20): deoxythymidine
  modified_base (21)..(21): deoxythymidine
ggcgacggcuguggccauctt

SEQ ID NO: 631 - DNA, 21 bp, Artificial Sequence
  Description of Artificial Sequence: Synthetic oligonucleotide
  Description of Combined DNA/RNA Molecule: Synthetic oligonucleotide
  siRNAs to PCSK9
  modified_base (1)..(1): 2'-hydroxy corresponding base
  modified_base (2)..(2): 2'-hydroxy corresponding base
  modified_base (3)..(3): 2'-hydroxy corresponding base
  modified_base (4)..(4): 2'-hydroxy corresponding base
  modified_base (5)..(5): 2'-hydroxy corresponding base
  modified_base (6)..(6): 2'-hydroxy corresponding base
  modified_base (7)..(7): 2'-hydroxy corresponding base
  modified_base (8)..(8): 2'-hydroxy corresponding base
  modified_base (9)..(9): 2'-hydroxy corresponding base
  modified_base (10)..(10): 2'-hydroxy corresponding base
  modified_base (11)..(11): 2'-hydroxy corresponding base
  modified_base (12)..(12): 2'-hydroxy corresponding base
  modified_base (13)..(13): 2'-hydroxy corresponding base
  modified_base (14)..(14): 2'-hydroxy corresponding base
  modified_base (15)..(15): 2'-hydroxy corresponding base
  modified_base (16)..(16): 2'-hydroxy corresponding base
  modified_base (17)..(17): 2'-hydroxy corresponding base
  modified_base (18)..(18): 2'-hydroxy corresponding base
  modified_base (19)..(19): 2'-hydroxy corresponding base
  modified_base (20)..(20): deoxythymidine
  modified_base (21)..(21): deoxythymidine
caagcuggucugccgggcctt

SEQ ID NO: 632 - DNA, 21 bp, Artificial Sequence
  Description of Artificial Sequence: Synthetic oligonucleotide
  Description of Combined DNA/RNA Molecule: Synthetic oligonucleotide
  siRNAs to PCSK9
  modified_base (1)..(1): 2'-hydroxy corresponding base
  modified_base (2)..(2): 2'-hydroxy corresponding base
  modified_base (3)..(3): 2'-hydroxy corresponding base
  modified_base (4)..(4): 2'-hydroxy corresponding base
  modified_base (5)..(5): 2'-hydroxy corresponding base
  modified_base (6)..(6): 2'-hydroxy corresponding base
  modified_base (7)..(7): 2'-hydroxy corresponding base
  modified_base (8)..(8): 2'-hydroxy corresponding base
  modified_base (9)..(9): 2'-hydroxy corresponding base
  modified_base (10)..(10): 2'-hydroxy corresponding base
  modified_base (11)..(11): 2'-hydroxy corresponding base
  modified_base (12)..(12): 2'-hydroxy corresponding base
  modified_base (13)..(13): 2'-hydroxy corresponding base
  modified_base (14)..(14): 2'-hydroxy corresponding base
  modified_base (15)..(15): 2'-hydroxy corresponding base
  modified_base (16)..(16): 2'-hydroxy corresponding base
  modified_base (17)..(17): 2'-hydroxy corresponding base
  modified_base (18)..(18): 2'-hydroxy corresponding base
  modified_base (19)..(19): 2'-hydroxy corresponding base
  modified_base (20)..(20): deoxythymidine
  modified_base (21)..(21): deoxythymidine
ggcccggcagaccagcuugtt

SEQ ID NO: 633 - DNA, 21 bp, Artificial Sequence
  Description of Artificial Sequence: Synthetic oligonucleotide
  Description of Combined DNA/RNA Molecule: Synthetic oligonucleotide
  siRNAs to PCSK9
  modified_base (1)..(1): 2'-hydroxy corresponding base
  modified_base (2)..(2): 2'-hydroxy corresponding base
  modified_base (3)..(3): 2'-hydroxy corresponding base
  modified_base (4)..(4): 2'-hydroxy corresponding base
  modified_base (5)..(5): 2'-hydroxy corresponding base
  modified_base (6)..(6): 2'-hydroxy corresponding base
  modified_base (7)..(7): 2'-hydroxy corresponding base
  modified_base (8)..(8): 2'-hydroxy corresponding base
  modified_base (9)..(9): 2'-hydroxy corresponding base
  modified_base (10)..(10): 2'-hydroxy corresponding base
  modified_base (11)..(11): 2'-hydroxy corresponding base
  modified_base (12)..(12): 2'-hydroxy corresponding base
  modified_base (13)..(13): 2'-hydroxy corresponding base
  modified_base (14)..(14): 2'-hydroxy corresponding base
  modified_base (15)..(15): 2'-hydroxy corresponding base
  modified_base (16)..(16): 2'-hydroxy corresponding base
  modified_base (17)..(17): 2'-hydroxy corresponding base
  modified_base (18)..(18): 2'-hydroxy corresponding base
  modified_base (19)..(19): 2'-hydroxy corresponding base
  modified_base (20)..(20): deoxythymidine
  modified_base (21)..(21): 5'-thio thymidine
cugccgggcccacaacgcutt

SEQ ID NO: 634 - DNA, 21 bp, Artificial Sequence
  Description of Artificial Sequence: Synthetic oligonucleotide
  Description of Combined DNA/RNA Molecule: Synthetic oligonucleotide
  siRNAs to PCSK9
  modified_base (1)..(1): 2'-hydroxy corresponding base
  modified_base (2)..(2): 2'-hydroxy corresponding base
  modified_base (3)..(3): 2'-hydroxy corresponding base
  modified_base (4)..(4): 2'-hydroxy corresponding base
  modified_base (5)..(5): 2'-hydroxy corresponding base
  modified_base (6)..(6): 2'-hydroxy corresponding base
  modified_base (7)..(7): 2'-hydroxy corresponding base
  modified_base (8)..(8): 2'-hydroxy corresponding base
  modified_base (9)..(9): 2'-hydroxy corresponding base
  modified_base (10)..(10): 2'-hydroxy corresponding base
  modified_base (11)..(11): 2'-hydroxy corresponding base
  modified_base (12)..(12): 2'-hydroxy corresponding base
  modified_base (13)..(13): 2'-hydroxy corresponding base
  modified_base (14)..(14): 2'-hydroxy corresponding base
  modified_base (15)..(15): 2'-hydroxy corresponding base
  modified_base (16)..(16): 2'-hydroxy corresponding base
  modified_base (17)..(17): 2'-hydroxy corresponding base
  modified_base (18)..(18): 2'-hydroxy corresponding base
  modified_base (19)..(19): 2'-hydroxy corresponding base
  modified_base (20)..(20): deoxythymidine
  modified_base (21)..(21): 5'-thio thymidine
agcguugugggcccggcagtt

SEQ ID NO: 635 - DNA, 21 bp, Artificial Sequence
  Description of Artificial Sequence: Synthetic oligonucleotide
  Description of Combined DNA/RNA Molecule: Synthetic oligonucleotide
  siRNAs to PCSK9
  modified_base (1)..(1): 2'-O-methyl corresponding base
  modified_base (2)..(2): 2'-O-methyl corresponding base
  modified_base (3)..(3): 2'-hydroxy corresponding base
  modified_base (4)..(4): 2'-O-methyl corresponding base
  modified_base (5)..(5): 2'-O-methyl corresponding base
  modified_base (6)..(6): 2'-hydroxy corresponding base
  modified_base (7)..(7): 2'-hydroxy corresponding base
  modified_base (8)..(8): 2'-hydroxy corresponding base
  modified_base (9)..(9): 2'-O-methyl corresponding base
  modified_base (10)..(10): 2'-O-methyl corresponding base
  modified_base (11)..(11): 2'-O-methyl corresponding base
  modified_base (12)..(12): 2'-hydroxy corresponding base
  modified_base (13)..(13): 2'-O-methyl corresponding base
  modified_base (14)..(14): 2'-hydroxy corresponding base
  modified_base (15)..(15): 2'-hydroxy corresponding base
  modified_base (16)..(16): 2'-O-methyl corresponding base
  modified_base (17)..(17): 2'-hydroxy corresponding base
  modified_base (18)..(18): 2'-O-methyl corresponding base
  modified_base (19)..(19): 2'-O-methyl corresponding base
  modified_base (20)..(20): deoxythymidine
  modified_base (21)..(21): 5'-thio thymidine
cugccgggcccacaacgcutt

SEQ ID NO: 636 - DNA, 21 bp, Artificial Sequence
  Description of Artificial Sequence: Synthetic oligonucleotide
  Description of Combined DNA/RNA Molecule: Synthetic oligonucleotide
  siRNAs to PCSK9
  modified_base (1)..(1): 2'-hydroxy corresponding base
  modified_base (2)..(2): 2'-hydroxy corresponding base
  modified_base (3)..(3): 2'-hydroxy corresponding base
  modified_base (4)..(4): 2'-hydroxy corresponding base
  modified_base (5)..(5): 2'-hydroxy corresponding base
  modified_base (6)..(6): 2'-hydroxy corresponding base
  modified_base (7)..(7): 2'-hydroxy corresponding base
  modified_base (8)..(8): 2'-hydroxy corresponding base
  modified_base (9)..(9): 2'-hydroxy corresponding base
  modified_base (10)..(10): 2'-hydroxy corresponding base
  modified_base (11)..(11): 2'-hydroxy corresponding base
  modified_base (12)..(12): 2'-hydroxy corresponding base
  modified_base (13)..(13): 2'-hydroxy corresponding base
  modified_base (14)..(14): 2'-hydroxy corresponding base
  modified_base (15)..(15): 2'-hydroxy corresponding base
  modified_base (16)..(16): 2'-hydroxy corresponding base
  modified_base (17)..(17): 2'-O-methyl corresponding base
  modified_base (18)..(18): 2'-hydroxy corresponding base
  modified_base (19)..(19): 2'-hydroxy corresponding base
  modified_base (20)..(20): deoxythymidine
  modified_base (21)..(21): 5'-thio thymidine
agcguugugggcccggcagtt

SEQ ID NO: 637 - DNA, 21 bp, Artificial Sequence
  Description of Artificial Sequence: Synthetic oligonucleotide
  Description of Combined DNA/RNA Molecule: Synthetic oligonucleotide
  siRNAs to PCSK9
  modified_base (1)..(1): 2'-hydroxy corresponding base
  modified_base (2)..(2): 2'-hydroxy corresponding base
  modified_base (3)..(3): 2'-hydroxy corresponding base
  modified_base (4)..(4): 2'-hydroxy corresponding base
  modified_base (5)..(5): 2'-hydroxy corresponding base
  modified_base (6)..(6): 2'-hydroxy corresponding base
  modified_base (7)..(7): 2'-hydroxy corresponding base
  modified_base (8)..(8): 2'-hydroxy corresponding base
  modified_base (9)..(9): 2'-hydroxy corresponding base
  modified_base (10)..(10): 2'-hydroxy corresponding base
  modified_base (11)..(11): 2'-hydroxy corresponding base
  modified_base (12)..(12): 2'-hydroxy corresponding base
  modified_base (13)..(13): 2'-hydroxy corresponding base
  modified_base (14)..(14): 2'-hydroxy corresponding base
  modified_base (15)..(15): 2'-hydroxy corresponding base
  modified_base (16)..(16): 2'-hydroxy corresponding base
  modified_base (17)..(17): 2'-hydroxy corresponding base
  modified_base (18)..(18): 2'-hydroxy corresponding base
  modified_base (19)..(19): 2'-hydroxy corresponding base
  modified_base (20)..(20): deoxythymidine
  modified_base (21)..(21): 5'-thio thymidine
ugccgggcccacaacgcuutt

SEQ ID NO: 638 - DNA, 21 bp, Artificial Sequence
  Description of Artificial Sequence: Synthetic oligonucleotide
  Description of Combined DNA/RNA Molecule: Synthetic oligonucleotide
  siRNAs to PCSK9
  modified_base (1)..(1): 2'-hydroxy corresponding base
  modified_base (2)..(2): 2'-hydroxy corresponding base
  modified_base (3)..(3): 2'-hydroxy corresponding base
  modified_base (4)..(4): 2'-hydroxy corresponding base
  modified_base (5)..(5): 2'-hydroxy corresponding base
  modified_base (6)..(6): 2'-hydroxy corresponding base
  modified_base (7)..(7): 2'-hydroxy corresponding base
  modified_base (8)..(8): 2'-hydroxy corresponding base
  modified_base (9)..(9): 2'-hydroxy corresponding base
  modified_base (10)..(10): 2'-hydroxy corresponding base
  modified_base (11)..(11): 2'-hydroxy corresponding base
  modified_base (12)..(12): 2'-hydroxy corresponding base
  modified_base (13)..(13): 2'-hydroxy corresponding base
  modified_base (14)..(14): 2'-hydroxy corresponding base
  modified_base (15)..(15): 2'-hydroxy corresponding base
  modified_base (16)..(16): 2'-hydroxy corresponding base
  modified_base (17)..(17): 2'-hydroxy corresponding base
  modified_base (18)..(18): 2'-hydroxy corresponding base
  modified_base (19)..(19): 2'-hydroxy corresponding base
  modified_base (20)..(20): deoxythymidine
  modified_base (21)..(21): 5'-thio thymidine
aagcguugugggcccggcatt

SEQ ID NO: 639 - DNA, 21 bp, Artificial Sequence
  Description of Artificial Sequence: Synthetic oligonucleotide
  Description of Combined DNA/RNA Molecule: Synthetic oligonucleotide
  siRNAs to PCSK9
  modified_base (1)..(1): 2'-O-methyl corresponding base
  modified_base (2)..(2): 2'-hydroxy corresponding base
  modified_base (3)..(3): 2'-O-methyl corresponding base
  modified_base (4)..(4): 2'-O-methyl corresponding base
  modified_base (5)..(5): 2'-hydroxy corresponding base
  modified_base (6)..(6): 2'-hydroxy corresponding base
  modified_base (7)..(7): 2'-hydroxy corresponding base
  modified_base (8)..(8): 2'-O-methyl corresponding base
  modified_base (9)..(9): 2'-O-methyl corresponding base
  modified_base (10)..(10): 2'-O-methyl corresponding base
  modified_base (11)..(11): 2'-hydroxy corresponding base
  modified_base (12)..(12): 2'-O-methyl corresponding base
  modified_base (13)..(13): 2'-hydroxy corresponding base
  modified_base (14)..(14): 2'-hydroxy corresponding base
  modified_base (15)..(15): 2'-O-methyl corresponding base
  modified_base (16)..(16): 2'-hydroxy corresponding base
  modified_base (17)..(17): 2'-O-methyl corresponding base
  modified_base (18)..(18): 2'-O-methyl corresponding base
  modified_base (19)..(19): 2'-O-methyl corresponding base
  modified_base (20)..(20): deoxythymidine
  modified_base (21)..(21): 5'-thio thymidine
ugccgggcccacaacgcuutt

SEQ ID NO: 640 - DNA, 21 bp, Artificial Sequence
  Description of Artificial Sequence: Synthetic oligonucleotide
  Description of Combined DNA/RNA Molecule: Synthetic oligonucleotide
  siRNAs to PCSK9
  modified_base (1)..(1): 2'-hydroxy corresponding base
  modified_base (2)..(2): 2'-hydroxy corresponding base
  modified_base (3)..(3): 2'-hydroxy corresponding base
  modified_base (4)..(4): 2'-hydroxy corresponding base
  modified_base (5)..(5): 2'-hydroxy corresponding base
  modified_base (6)..(6): 2'-hydroxy corresponding base
  modified_base (7)..(7): 2'-hydroxy corresponding base
  modified_base (8)..(8): 2'-hydroxy corresponding base
  modified_base (9)..(9): 2'-hydroxy corresponding base
  modified_base (10)..(10): 2'-hydroxy corresponding base
  modified_base (11)..(11): 2'-hydroxy corresponding base
  modified_base (12)..(12): 2'-hydroxy corresponding base
  modified_base (13)..(13): 2'-hydroxy corresponding base
  modified_base (14)..(14): 2'-hydroxy corresponding base
  modified_base (15)..(15): 2'-hydroxy corresponding base
  modified_base (16)..(16): 2'-hydroxy corresponding base
  modified_base (17)..(17): 2'-hydroxy corresponding base
  modified_base (18)..(18): 2'-O-methyl corresponding base
  modified_base (19)..(19): 2'-hydroxy corresponding base
  modified_base (20)..(20): deoxythymidine
  modified_base (21)..(21): 5'-thio thymidine
aagcguugugggcccggcatt

SEQ ID NO: 641 - DNA, 21 bp, Artificial Sequence
  Description of Artificial Sequence: Synthetic oligonucleotide
  Description of Combined DNA/RNA Molecule: Synthetic oligonucleotide
  siRNAs to PCSK9
  modified_base (1)..(1): 2'-hydroxy corresponding base
  modified_base (2)..(2): 2'-hydroxy corresponding base
  modified_base (3)..(3): 2'-hydroxy corresponding base
  modified_base (4)..(4): 2'-hydroxy corresponding base
  modified_base (5)..(5): 2'-hydroxy corresponding base
  modified_base (6)..(6): 2'-hydroxy corresponding base
  modified_base (7)..(7): 2'-hydroxy corresponding base
  modified_base (8)..(8): 2'-hydroxy corresponding base
  modified_base (9)..(9): 2'-hydroxy corresponding base
  modified_base (10)..(10): 2'-hydroxy corresponding base
  modified_base (11)..(11): 2'-hydroxy corresponding base
  modified_base (12)..(12): 2'-hydroxy corresponding base
  modified_base (13)..(13): 2'-hydroxy corresponding base
  modified_base (14)..(14): 2'-hydroxy corresponding base
  modified_base (15)..(15): 2'-hydroxy corresponding base
  modified_base (16)..(16): 2'-hydroxy corresponding base
  modified_base (17)..(17): 2'-hydroxy corresponding base
  modified_base (18)..(18): 2'-hydroxy corresponding base
  modified_base (19)..(19): 2'-hydroxy corresponding base
  modified_base (20)..(20): deoxythymidine
  modified_base (21)..(21): 5'-thio thymidine
ccgggcccacaacgcuuuutt

SEQ ID NO: 642 - DNA, 21 bp, Artificial Sequence
  Description of Artificial Sequence: Synthetic oligonucleotide
  Description of Combined DNA/RNA Molecule: Synthetic oligonucleotide
  siRNAs to PCSK9
  modified_base (1)..(1): 2'-hydroxy corresponding base
  modified_base (2)..(2): 2'-hydroxy corresponding base
  modified_base (3)..(3): 2'-hydroxy corresponding base
  modified_base (4)..(4): 2'-hydroxy corresponding base
  modified_base (5)..(5): 2'-hydroxy corresponding base
  modified_base (6)..(6): 2'-hydroxy corresponding base
  modified_base (7)..(7): 2'-hydroxy corresponding base
  modified_base (8)..(8): 2'-hydroxy corresponding base
  modified_base (9)..(9): 2'-hydroxy corresponding base
  modified_base (10)..(10): 2'-hydroxy corresponding base
  modified_base (11)..(11): 2'-hydroxy corresponding base
  modified_base (12)..(12): 2'-hydroxy corresponding base
  modified_base (13)..(13): 2'-hydroxy corresponding base
  modified_base (14)..(14): 2'-hydroxy corresponding base
  modified_base (15)..(15): 2'-hydroxy corresponding base
  modified_base (16)..(16): 2'-hydroxy corresponding base
  modified_base (17)..(17): 2'-hydroxy corresponding base
  modified_base (18)..(18): 2'-hydroxy corresponding base
  modified_base (19)..(19): 2'-hydroxy corresponding base
  modified_base (20)..(20): deoxythymidine
  modified_base (21)..(21): 5'-thio thymidine
aaaagcguugugggcccggtt

SEQ ID NO: 643 - DNA, 21 bp, Artificial Sequence
  Description of Artificial Sequence: Synthetic oligonucleotide
  Description of Combined DNA/RNA Molecule: Synthetic oligonucleotide
  siRNAs to PCSK9
  modified_base (1)..(1): 2'-O-methyl corresponding base
  modified_base (2)..(2): 2'-O-methyl corresponding base
  modified_base (3)..(3): 2'-hydroxy corresponding base
  modified_base (4)..(4): 2'-hydroxy corresponding base
  modified_base (5)..(5): 2'-hydroxy corresponding base
  modified_base (6)..(6): 2'-O-methyl corresponding base
  modified_base (7)..(7): 2'-O-methyl corresponding base
  modified_base (8)..(8): 2'-O-methyl corresponding base
  modified_base (9)..(9): 2'-hydroxy corresponding base
  modified_base (10)..(10): 2'-O-methyl corresponding base
  modified_base (11)..(11): 2'-hydroxy corresponding base
  modified_base (12)..(12): 2'-hydroxy corresponding base
  modified_base (13)..(13): 2'-O-methyl corresponding base
  modified_base (14)..(14): 2'-hydroxy corresponding base
  modified_base (15)..(15): 2'-O-methyl corresponding base
  modified_base (16)..(16): 2'-O-methyl corresponding base
  modified_base (17)..(17): 2'-O-methyl corresponding base
  modified_base (18)..(18): 2'-O-methyl corresponding base
  modified_base (19)..(19): 2'-O-methyl corresponding base
  modified_base (20)..(20): deoxythymidine
  modified_base (21)..(21): 5'-thio thymidine
ccgggcccacaacgcuuuutt

SEQ ID NO: 644 - DNA, 21 bp, Artificial Sequence
  Description of Artificial Sequence: Synthetic oligonucleotide
  Description of Combined DNA/RNA Molecule: Synthetic oligonucleotide
  siRNAs to PCSK9
  modified_base (1)..(1): 2'-hydroxy corresponding base
  modified_base (2)..(2): 2'-hydroxy corresponding base
  modified_base (3)..(3): 2'-hydroxy corresponding base
  modified_base (4)..(4): 2'-hydroxy corresponding base
  modified_base (5)..(5): 2'-hydroxy corresponding base
  modified_base (6)..(6): 2'-hydroxy corresponding base
  modified_base (7)..(7): 2'-hydroxy corresponding base
  modified_base (8)..(8): 2'-hydroxy corresponding base
  modified_base (9)..(9): 2'-hydroxy corresponding base
  modified_base (10)..(10): 2'-hydroxy corresponding base
  modified_base (11)..(11): 2'-hydroxy corresponding base
  modified_base (12)..(12): 2'-hydroxy corresponding base
  modified_base (13)..(13): 2'-hydroxy corresponding base
  modified_base (14)..(14): 2'-hydroxy corresponding base
  modified_base (15)..(15): 2'-hydroxy corresponding base
  modified_base (16)..(16): 2'-hydroxy corresponding base
  modified_base (17)..(17): 2'-hydroxy corresponding base
  modified_base (18)..(18): 2'-hydroxy corresponding base
  modified_base (19)..(19): 2'-hydroxy corresponding base
  modified_base (20)..(20): deoxythymidine
  modified_base (21)..(21): 5'-thio thymidine
aaaagcguugugggcccggtt

SEQ ID NO: 645 - DNA, 21 bp, Artificial Sequence
  Description of Artificial Sequence: Synthetic oligonucleotide
  Description of Combined DNA/RNA Molecule: Synthetic oligonucleotide
  siRNAs to PCSK9
  modified_base (1)..(1): 2'-hydroxy corresponding base
  modified_base (2)..(2): 2'-hydroxy corresponding base
  modified_base (3)..(3): 2'-hydroxy corresponding base
  modified_base (4)..(4): 2'-hydroxy corresponding base
  modified_base (5)..(5): 2'-hydroxy corresponding base
  modified_base (6)..(6): 2'-hydroxy corresponding base
  modified_base (7)..(7): 2'-hydroxy corresponding base
  modified_base (8)..(8): 2'-hydroxy corresponding base
  modified_base (9)..(9): 2'-hydroxy corresponding base
  modified_base (10)..(10): 2'-hydroxy corresponding base
  modified_base (11)..(11): 2'-hydroxy corresponding base
  modified_base (12)..(12): 2'-hydroxy corresponding base
  modified_base (13)..(13): 2'-hydroxy corresponding base
  modified_base (14)..(14): 2'-hydroxy corresponding base
  modified_base (15)..(15): 2'-hydroxy corresponding base
  modified_base (16)..(16): 2'-hydroxy corresponding base
  modified_base (17)..(17): 2'-hydroxy corresponding base
  modified_base (18)..(18): 2'-hydroxy corresponding base
  modified_base (19)..(19): 2'-hydroxy corresponding base
  modified_base (20)..(20): deoxythymidine
  modified_base (21)..(21): 5'-thio thymidine
gggcccacaacgcuuuuggtt

SEQ ID NO: 646 - DNA, 21 bp, Artificial Sequence
  Description of Artificial Sequence: Synthetic oligonucleotide
  Description of Combined DNA/RNA Molecule: Synthetic oligonucleotide
  siRNAs to PCSK9
  modified_base (1)..(1): 2'-hydroxy corresponding base
  modified_base (2)..(2): 2'-hydroxy corresponding base
  modified_base (3)..(3): 2'-hydroxy corresponding base
  modified_base (4)..(4): 2'-hydroxy corresponding base
  modified_base (5)..(5): 2'-hydroxy corresponding base
  modified_base (6)..(6): 2'-hydroxy corresponding base
  modified_base (7)..(7): 2'-hydroxy corresponding base
  modified_base (8)..(8): 2'-hydroxy corresponding base
  modified_base (9)..(9): 2'-hydroxy corresponding base
  modified_base (10)..(10): 2'-hydroxy corresponding base
  modified_base (11)..(11): 2'-hydroxy corresponding base
  modified_base (12)..(12): 2'-hydroxy corresponding base
  modified_base (13)..(13): 2'-hydroxy corresponding base
  modified_base (14)..(14): 2'-hydroxy corresponding base
  modified_base (15)..(15): 2'-hydroxy corresponding base
  modified_base (16)..(16): 2'-hydroxy corresponding base
  modified_base (17)..(17): 2'-hydroxy corresponding base
  modified_base (18)..(18): 2'-hydroxy corresponding base
  modified_base (19)..(19): 2'-hydroxy corresponding base
  modified_base (20)..(20): deoxythymidine
  modified_base (21)..(21): 5'-thio thymidine
ccaaaagcguugugggccctt

SEQ ID NO: 647 - DNA, 21 bp, Artificial Sequence
  Description of Artificial Sequence: Synthetic oligonucleotide
  Description of Combined DNA/RNA Molecule: Synthetic oligonucleotide
  siRNAs to PCSK9
  modified_base (1)..(1): 2'-hydroxy corresponding base
  modified_base (2)..(2): 2'-hydroxy corresponding base
  modified_base (3)..(3): 2'-hydroxy corresponding base
  modified_base (4)..(4): 2'-O-methyl corresponding base
  modified_base (5)..(5): 2'-O-methyl corresponding base
  modified_base (6)..(6): 2'-O-methyl corresponding base
  modified_base (7)..(7): 2'-hydroxy corresponding base
  modified_base (8)..(8): 2'-O-methyl corresponding base
  modified_base (9)..(9): 2'-hydroxy corresponding base
  modified_base (10)..(10): 2'-hydroxy corresponding base
  modified_base (11)..(11): 2'-O-methyl corresponding base
  modified_base (12)..(12): 2'-hydroxy corresponding base
  modified_base (13)..(13): 2'-O-methyl corresponding base
  modified_base (14)..(14): 2'-O-methyl corresponding base
  modified_base (15)..(15): 2'-O-methyl corresponding base
  modified_base (16)..(16): 2'-O-methyl corresponding base
  modified_base (17)..(17): 2'-O-methyl corresponding base
  modified_base (18)..(18): 2'-hydroxy corresponding base
  modified_base (19)..(19): 2'-hydroxy corresponding base
  modified_base (20)..(20): deoxythymidine
  modified_base (21)..(21): 5'-thio thymidine
gggcccacaacgcuuuuggtt

SEQ ID NO: 648 - DNA, 21 bp, Artificial Sequence
  Description of Artificial Sequence: Synthetic oligonucleotide
  Description of Combined DNA/RNA Molecule: Synthetic oligonucleotide
  siRNAs to PCSK9
  modified_base (1)..(1): 2'-hydroxy corresponding base
  modified_base (2)..(2): 2'-O-methyl corresponding base
  modified_base (3)..(3): 2'-hydroxy corresponding base
  modified_base (4)..(4): 2'-hydroxy corresponding base
  modified_base (5)..(5): 2'-hydroxy corresponding base
  modified_base (6)..(6): 2'-hydroxy corresponding base
  modified_base (7)..(7): 2'-hydroxy corresponding base
  modified_base (8)..(8): 2'-hydroxy corresponding base
  modified_base (9)..(9): 2'-hydroxy corresponding base
  modified_base (10)..(10): 2'-hydroxy corresponding base
  modified_base (11)..(11): 2'-hydroxy corresponding base
  modified_base (12)..(12): 2'-hydroxy corresponding base
  modified_base (13)..(13): 2'-hydroxy corresponding base
  modified_base (14)..(14): 2'-hydroxy corresponding base
  modified_base (15)..(15): 2'-hydroxy corresponding base
  modified_base (16)..(16): 2'-hydroxy corresponding base
  modified_base (17)..(17): 2'-hydroxy corresponding base
  modified_base (18)..(18): 2'-hydroxy corresponding base
  modified_base (19)..(19): 2'-hydroxy corresponding base
  modified_base (20)..(20): deoxythymidine
  modified_base (21)..(21): 5'-thio thymidine
ccaaaagcguugugggccctt

SEQ ID NO: 649 - DNA, 21 bp, Artificial Sequence
  Description of Artificial Sequence: Synthetic oligonucleotide
  Description of Combined DNA/RNA Molecule: Synthetic oligonucleotide
  siRNAs to PCSK9
  modified_base (1)..(1): 2'-hydroxy corresponding base
  modified_base (2)..(2): 2'-hydroxy corresponding base
  modified_base (3)..(3): 2'-hydroxy corresponding base
  modified_base (4)..(4): 2'-hydroxy corresponding base
  modified_base (5)..(5): 2'-hydroxy corresponding base
  modified_base (6)..(6): 2'-hydroxy corresponding base
  modified_base (7)..(7): 2'-hydroxy corresponding base
  modified_base (8)..(8): 2'-hydroxy corresponding base
  modified_base (9)..(9): 2'-hydroxy corresponding base
  modified_base (10)..(10): 2'-hydroxy corresponding base
  modified_base (11)..(11): 2'-hydroxy corresponding base
  modified_base (12)..(12): 2'-hydroxy corresponding base
  modified_base (13)..(13): 2'-hydroxy corresponding base
  modified_base (14)..(14): 2'-hydroxy corresponding base
  modified_base (15)..(15): 2'-hydroxy corresponding base
  modified_base (16)..(16): 2'-hydroxy corresponding base
  modified_base (17)..(17): 2'-hydroxy corresponding base
  modified_base (18)..(18): 2'-hydroxy corresponding base
  modified_base (19)..(19): 2'-hydroxy corresponding base
  modified_base (20)..(20): deoxythymidine
  modified_base (21)..(21): 5'-thio thymidine
ggugagggugucuacgccatt

SEQ ID NO: 650 - DNA, 21 bp, Artificial Sequence
  Description of Artificial Sequence: Synthetic oligonucleotide
  Description of Combined DNA/RNA Molecule: Synthetic oligonucleotide
  siRNAs to PCSK9
  modified_base (1)..(1): 2'-hydroxy corresponding base
  modified_base (2)..(2): 2'-hydroxy corresponding base
  modified_base (3)..(3): 2'-hydroxy corresponding base
  modified_base (4)..(4): 2'-hydroxy corresponding base
  modified_base (5)..(5): 2'-hydroxy corresponding base
  modified_base (6)..(6): 2'-hydroxy corresponding base
  modified_base (7)..(7): 2'-hydroxy corresponding base
  modified_base (8)..(8): 2'-hydroxy corresponding base
  modified_base (9)..(9): 2'-hydroxy corresponding base
  modified_base (10)..(10): 2'-hydroxy corresponding base
  modified_base (11)..(11): 2'-hydroxy corresponding base
  modified_base (12)..(12): 2'-hydroxy corresponding base
  modified_base (13)..(13): 2'-hydroxy corresponding base
  modified_base (14)..(14): 2'-hydroxy corresponding base
  modified_base (15)..(15): 2'-hydroxy corresponding base
  modified_base (16)..(16): 2'-hydroxy corresponding base
  modified_base (17)..(17): 2'-hydroxy corresponding base
  modified_base (18)..(18): 2'-hydroxy corresponding base
  modified_base (19)..(19): 2'-hydroxy corresponding base
  modified_base (20)..(20): deoxythymidine
  modified_base (21)..(21): 5'-thio thymidine
uggcguagacacccucacctt

SEQ ID NO: 651 - DNA, 21 bp, Artificial Sequence
  Description of Artificial Sequence: Synthetic oligonucleotide
  Description of Combined DNA/RNA Molecule: Synthetic oligonucleotide
  siRNAs to PCSK9
  modified_base (1)..(1): 2'-hydroxy corresponding base
  modified_base (2)..(2): 2'-hydroxy corresponding base
  modified_base (3)..(3): 2'-O-methyl corresponding base
  modified_base (4)..(4): 2'-hydroxy corresponding base
  modified_base (5)..(5): 2'-hydroxy corresponding base
  modified_base (6)..(6): 2'-hydroxy corresponding base
  modified_base (7)..(7): 2'-hydroxy corresponding base
  modified_base (8)..(8): 2'-hydroxy corresponding base
  modified_base (9)..(9): 2'-O-methyl corresponding base
  modified_base (10)..(10): 2'-hydroxy corresponding base
  modified_base (11)..(11): 2'-O-methyl corresponding base
  modified_base (12)..(12): 2'-O-methyl corresponding base
  modified_base (13)..(13): 2'-O-methyl corresponding base
  modified_base (14)..(14): 2'-hydroxy corresponding base
  modified_base (15)..(15): 2'-O-methyl corresponding base
  modified_base (16)..(16): 2'-hydroxy corresponding base
  modified_base (17)..(17): 2'-O-methyl corresponding base
  modified_base (18)..(18): 2'-O-methyl corresponding base
  modified_base (19)..(19): 2'-hydroxy corresponding base
  modified_base (20)..(20): deoxythymidine
  modified_base (21)..(21): 5'-thio thymidine
ggugagggugucuacgccatt

SEQ ID NO: 652 - DNA, 21 bp, Artificial Sequence
  Description of Artificial Sequence: Synthetic oligonucleotide
  Description of Combined DNA/RNA Molecule: Synthetic oligonucleotide
  siRNAs to PCSK9
  modified_base (1)..(1): 2'-hydroxy corresponding base
  modified_base (2)..(2): 2'-hydroxy corresponding base
  modified_base (3)..(3): 2'-hydroxy corresponding base
  modified_base (4)..(4): 2'-hydroxy corresponding base
  modified_base (5)..(5): 2'-hydroxy corresponding base
  modified_base (6)..(6): 2'-O-methyl corresponding base
  modified_base (7)..(7): 2'-hydroxy corresponding base
  modified_base (8)..(8): 2'-hydroxy corresponding base
  modified_base (9)..(9): 2'-hydroxy corresponding base
  modified_base (10)..(10): 2'-O-methyl corresponding base
  modified_base (11)..(11): 2'-hydroxy corresponding base
  modified_base (12)..(12): 2'-hydroxy corresponding base
  modified_base (13)..(13): 2'-hydroxy corresponding base
  modified_base (14)..(14): 2'-hydroxy corresponding base
  modified_base (15)..(15): 2'-hydroxy corresponding base
  modified_base (16)..(16): 2'-O-methyl corresponding base
  modified_base (17)..(17): 2'-hydroxy corresponding base
  modified_base (18)..(18): 2'-hydroxy corresponding base
  modified_base (19)..(19): 2'-hydroxy corresponding base
  modified_base (20)..(20): deoxythymidine
  modified_base (21)..(21): 5'-thio thymidine
uggcguagacacccucacctt

SEQ ID NO: 653 - DNA, 21 bp, Artificial Sequence
  Description of Artificial Sequence: Synthetic oligonucleotide
  Description of Combined DNA/RNA Molecule: Synthetic oligonucleotide
  siRNAs to PCSK9
  modified_base (1)..(1): 2'-hydroxy corresponding base
  modified_base (2)..(2): 2'-hydroxy corresponding base
  modified_base (3)..(3): 2'-hydroxy corresponding base
  modified_base (4)..(4): 2'-hydroxy corresponding base
  modified_base (5)..(5): 2'-hydroxy corresponding base
  modified_base (6)..(6): 2'-hydroxy corresponding base
  modified_base (7)..(7): 2'-hydroxy corresponding base
  modified_base (8)..(8): 2'-hydroxy corresponding base
  modified_base (9)..(9): 2'-hydroxy corresponding base
  modified_base (10)..(10): 2'-hydroxy corresponding base
  modified_base (11)..(11): 2'-hydroxy corresponding base
  modified_base (12)..(12): 2'-hydroxy corresponding base
  modified_base (13)..(13): 2'-hydroxy corresponding base
  modified_base (14)..(14): 2'-hydroxy corresponding base
  modified_base (15)..(15): 2'-hydroxy corresponding base
  modified_base (16)..(16): 2'-hydroxy corresponding base
  modified_base (17)..(17): 2'-hydroxy corresponding base
  modified_base (18)..(18): 2'-hydroxy corresponding base
  modified_base (19)..(19): 2'-hydroxy corresponding base
  modified_base (20)..(20): deoxythymidine
  modified_base (21)..(21): 5'-thio thymidine
gagggugucuacgccauugtt

SEQ ID NO: 654 - DNA, 21 bp, Artificial Sequence
  Description of Artificial Sequence: Synthetic oligonucleotide
  Description of Combined DNA/RNA Molecule: Synthetic oligonucleotide
  siRNAs to PCSK9
  modified_base (1)..(1): 2'-hydroxy corresponding base
  modified_base (2)..(2): 2'-hydroxy corresponding base
  modified_base (3)..(3): 2'-hydroxy corresponding base
  modified_base (4)..(4): 2'-hydroxy corresponding base
  modified_base (5)..(5): 2'-hydroxy corresponding base
  modified_base (6)..(6): 2'-hydroxy corresponding base
  modified_base (7)..(7): 2'-hydroxy corresponding base
  modified_base (8)..(8): 2'-hydroxy corresponding base
  modified_base (9)..(9): 2'-hydroxy corresponding base
  modified_base (10)..(10): 2'-hydroxy corresponding base
  modified_base (11)..(11): 2'-hydroxy corresponding base
  modified_base (12)..(12): 2'-hydroxy corresponding base
  modified_base (13)..(13): 2'-hydroxy corresponding base
  modified_base (14)..(14): 2'-hydroxy corresponding base
  modified_base (15)..(15): 2'-hydroxy corresponding base
  modified_base (16)..(16): 2'-hydroxy corresponding base
  modified_base (17)..(17): 2'-hydroxy corresponding base
  modified_base (18)..(18): 2'-hydroxy corresponding base
  modified_base (19)..(19): 2'-hydroxy corresponding base
  modified_base (20)..(20): deoxythymidine
  modified_base (21)..(21): 5'-thio thymidine
caauggcguagacacccuctt

SEQ ID NO: 655 - DNA, 21 bp, Artificial Sequence
  Description of Artificial Sequence: Synthetic oligonucleotide
  Description of Combined DNA/RNA Molecule: Synthetic oligonucleotide
  siRNAs to PCSK9
  modified_base (1)..(1): 2'-hydroxy corresponding base
  modified_base (2)..(2): 2'-hydroxy corresponding base
  modified_base (3)..(3): 2'-hydroxy corresponding base
  modified_base (4)..(4): 2'-hydroxy corresponding base
  modified_base (5)..(5): 2'-hydroxy corresponding base
  modified_base (6)..(6): 2'-O-methyl corresponding base
  modified_base (7)..(7): 2'-hydroxy corresponding base
  modified_base (8)..(8): 2'-O-methyl corresponding base
  modified_base (9)..(9): 2'-O-methyl corresponding base
  modified_base (10)..(10): 2'-O-methyl corresponding base
  modified_base (11)..(11): 2'-hydroxy corresponding base
  modified_base (12)..(12): 2'-O-methyl corresponding base
  modified_base (13)..(13): 2'-hydroxy corresponding base
  modified_base (14)..(14): 2'-O-methyl corresponding base
  modified_base (15)..(15): 2'-O-methyl corresponding base
  modified_base (16)..(16): 2'-hydroxy corresponding base
  modified_base (17)..(17): 2'-O-methyl corresponding base
  modified_base (18)..(18): 2'-O-methyl corresponding base
  modified_base (19)..(19): 2'-hydroxy corresponding base
  modified_base (20)..(20): deoxythymidine
  modified_base (21)..(21): 5'-thio thymidine
gagggugucuacgccauugtt

SEQ ID NO: 656 - DNA, 21 bp, Artificial Sequence
  Description of Artificial Sequence: Synthetic oligonucleotide
  Description of Combined DNA/RNA Molecule: Synthetic oligonucleotide
  siRNAs to PCSK9
  modified_base (1)..(1): 2'-O-methyl corresponding base
  modified_base (2)..(2): 2'-hydroxy corresponding base
  modified_base (3)..(3): 2'-hydroxy corresponding base
  modified_base (4)..(4): 2'-hydroxy corresponding base
  modified_base (5)..(5): 2'-hydroxy corresponding base
  modified_base (6)..(6): 2'-hydroxy corresponding base
  modified_base (7)..(7): 2'-hydroxy corresponding base
  modified_base (8)..(8): 2'-hydroxy corresponding base
  modified_base (9)..(9): 2'-O-methyl corresponding base
  modified_base (10)..(10): 2'-hydroxy corresponding base
  modified_base (11)..(11): 2'-hydroxy corresponding base
  modified_base (12)..(12): 2'-hydroxy corresponding base
  modified_base (13)..(13): 2'-O-methyl corresponding base
  modified_base (14)..(14): 2'-hydroxy corresponding base
  modified_base (15)..(15): 2'-hydroxy corresponding base
  modified_base (16)..(16): 2'-hydroxy corresponding base
  modified_base (17)..(17): 2'-hydroxy corresponding base
  modified_base (18)..(18): 2'-hydroxy corresponding base
  modified_base (19)..(19): 2'-hydroxy corresponding base
  modified_base (20)..(20): deoxythymidine
  modified_base (21)..(21): 5'-thio thymidine
caauggcguagacacccuctt

SEQ ID NO: 657 - DNA, 21 bp, Artificial Sequence
  Description of Artificial Sequence: Synthetic oligonucleotide
  Description of Combined DNA/RNA Molecule: Synthetic oligonucleotide
  siRNAs to PCSK9
  modified_base (1)..(1): 2'-hydroxy corresponding base
  modified_base (2)..(2): 2'-hydroxy corresponding base
  modified_base (3)..(3): 2'-hydroxy corresponding base
  modified_base (4)..(4): 2'-hydroxy corresponding base
  modified_base (5)..(5): 2'-hydroxy corresponding base
  modified_base (6)..(6): 2'-hydroxy corresponding base
  modified_base (7)..(7): 2'-hydroxy corresponding base
  modified_base (8)..(8): 2'-hydroxy corresponding base
  modified_base (9)..(9): 2'-hydroxy corresponding base
  modified_base (10)..(10): 2'-hydroxy corresponding base
  modified_base (11)..(11): 2'-hydroxy corresponding base
  modified_base (12)..(12): 2'-hydroxy corresponding base
  modified_base (13)..(13): 2'-hydroxy corresponding base
  modified_base (14)..(14): 2'-hydroxy corresponding base
  modified_base (15)..(15): 2'-hydroxy corresponding base
  modified_base (16)..(16): 2'-hydroxy corresponding base
  modified_base (17)..(17): 2'-hydroxy corresponding base
  modified_base (18)..(18): 2'-hydroxy corresponding base
  modified_base (19)..(19): 2'-hydroxy corresponding base
  modified_base (20)..(20): deoxythymidine
  modified_base (21)..(21): 5'-thio thymidine
gccaggugcugccugcuactt

SEQ ID NO: 658 - DNA, 21 bp, Artificial Sequence
  Description of Artificial Sequence: Synthetic oligonucleotide
  Description of Combined DNA/RNA Molecule: Synthetic oligonucleotide
  siRNAs to PCSK9
  modified_base (1)..(1): 2'-hydroxy corresponding base
  modified_base (2)..(2): 2'-hydroxy corresponding base
  modified_base (3)..(3): 2'-hydroxy corresponding base
  modified_base (4)..(4): 2'-hydroxy corresponding base
  modified_base (5)..(5): 2'-hydroxy corresponding base
  modified_base (6)..(6): 2'-hydroxy corresponding base
  modified_base (7)..(7): 2'-hydroxy corresponding base
  modified_base (8)..(8): 2'-hydroxy corresponding base
  modified_base (9)..(9): 2'-hydroxy corresponding base
  modified_base (10)..(10): 2'-hydroxy corresponding base
  modified_base (11)..(11): 2'-hydroxy corresponding base
  modified_base (12)..(12): 2'-hydroxy corresponding base
  modified_base (13)..(13): 2'-hydroxy corresponding base
  modified_base (14)..(14): 2'-hydroxy corresponding base
  modified_base (15)..(15): 2'-hydroxy corresponding base
  modified_base (16)..(16): 2'-hydroxy corresponding base
  modified_base (17)..(17): 2'-hydroxy corresponding base
  modified_base (18)..(18): 2'-hydroxy corresponding base
  modified_base (19)..(19): 2'-hydroxy corresponding base
  modified_base (20)..(20): deoxythymidine
  modified_base (21)..(21): 5'-thio thymidine
guagcaggcagcaccuggctt

SEQ ID NO: 659 - DNA, 21 bp, Artificial Sequence
  Description of Artificial Sequence: Synthetic oligonucleotide
  Description of Combined DNA/RNA Molecule: Synthetic oligonucleotide
  siRNAs to PCSK9
  modified_base (1)..(1): 2'-hydroxy corresponding base
  modified_base (2)..(2): 2'-O-methyl corresponding base
  modified_base (3)..(3): 2'-O-methyl corresponding base
  modified_base (4)..(4): 2'-hydroxy corresponding base
  modified_base (5)..(5): 2'-hydroxy corresponding base
  modified_base (6)..(6): 2'-hydroxy corresponding base
  modified_base (7)..(7): 2'-O-methyl corresponding base
  modified_base (8)..(8): 2'-hydroxy corresponding base
  modified_base (9)..(9): 2'-O-methyl corresponding base
  modified_base (10)..(10): 2'-O-methyl corresponding base
  modified_base (11)..(11): 2'-hydroxy corresponding base
  modified_base (12)..(12): 2'-O-methyl corresponding base
  modified_base (13)..(13): 2'-O-methyl corresponding base
  modified_base (14)..(14): 2'-O-methyl corresponding base
  modified_base (15)..(15): 2'-hydroxy corresponding base
  modified_base (16)..(16): 2'-O-methyl corresponding base
  modified_base (17)..(17): 2'-O-methyl corresponding base
  modified_base (18)..(18): 2'-hydroxy corresponding base
  modified_base (19)..(19): 2'-O-methyl corresponding base
  modified_base (20)..(20): deoxythymidine
  modified_base (21)..(21): 5'-thio thymidine
gccaggugcugccugcuactt

SEQ ID NO: 660 - DNA, 21 bp, Artificial Sequence
  Description of Artificial Sequence: Synthetic oligonucleotide
  Description of Combined DNA/RNA Molecule: Synthetic oligonucleotide
  siRNAs to PCSK9
  modified_base (1)..(1): 2'-hydroxy corresponding base
  modified_base (2)..(2): 2'-O-methyl corresponding base
  modified_base (3)..(3): 2'-hydroxy corresponding base
  modified_base (4)..(4): 2'-hydroxy corresponding base
  modified_base (5)..(5): 2'-O-methyl corresponding base
  modified_base (6)..(6): 2'-hydroxy corresponding base
  modified_base (7)..(7): 2'-hydroxy corresponding base
  modified_base (8)..(8): 2'-hydroxy corresponding base
  modified_base (9)..(9): 2'-O-methyl corresponding base
  modified_base (10)..(10): 2'-hydroxy corresponding base
  modified_base (11)..(11): 2'-hydroxy corresponding base
  modified_base (12)..(12): 2'-O-methyl corresponding base
  modified_base (13)..(13): 2'-hydroxy corresponding base
  modified_base (14)..(14): 2'-hydroxy corresponding base
  modified_base (15)..(15): 2'-hydroxy corresponding base
  modified_base (16)..(16): 2'-hydroxy corresponding base
  modified_base (17)..(17): 2'-hydroxy corresponding base
  modified_base (18)..(18): 2'-hydroxy corresponding base
  modified_base (19)..(19): 2'-hydroxy corresponding base
  modified_base (20)..(20): deoxythymidine
  modified_base (21)..(21): 5'-thio thymidine
guagcaggcagcaccuggctt

SEQ ID NO: 661 - DNA, 21 bp, Artificial Sequence
  Description of Artificial Sequence: Synthetic oligonucleotide
  Description of Combined DNA/RNA Molecule: Synthetic oligonucleotide
  siRNAs to PCSK9
  modified_base (1)..(1): 2'-hydroxy corresponding base
  modified_base (2)..(2): 2'-hydroxy corresponding base
  modified_base (3)..(3): 2'-hydroxy corresponding base
  modified_base (4)..(4): 2'-hydroxy corresponding base
  modified_base (5)..(5): 2'-hydroxy corresponding base
  modified_base (6)..(6): 2'-hydroxy corresponding base
  modified_base (7)..(7): 2'-hydroxy corresponding base
  modified_base (8)..(8): 2'-hydroxy corresponding base
  modified_base (9)..(9): 2'-hydroxy corresponding base
  modified_base (10)..(10): 2'-hydroxy corresponding base
  modified_base (11)..(11): 2'-hydroxy corresponding base
  modified_base (12)..(12): 2'-hydroxy corresponding base
  modified_base (13)..(13): 2'-hydroxy corresponding base
  modified_base (14)..(14): 2'-hydroxy corresponding base
  modified_base (15)..(15): 2'-hydroxy corresponding base
  modified_base (16)..(16): 2'-hydroxy corresponding base
  modified_base (17)..(17): 2'-hydroxy corresponding base
  modified_base (18)..(18): 2'-hydroxy corresponding base
  modified_base (19)..(19): 2'-hydroxy corresponding base
  modified_base (20)..(20): deoxythymidine
  modified_base (21)..(21): 5'-thio thymidine
ccaggugcugccugcuacctt

SEQ ID NO: 662 - DNA, 21 bp, Artificial Sequence
  Description of Artificial Sequence: Synthetic oligonucleotide
  Description of Combined DNA/RNA Molecule: Synthetic oligonucleotide
  siRNAs to PCSK9
  modified_base (1)..(1): 2'-hydroxy corresponding base
  modified_base (2)..(2): 2'-hydroxy corresponding base
  modified_base (3)..(3): 2'-hydroxy corresponding base
  modified_base (4)..(4): 2'-hydroxy corresponding base
  modified_base (5)..(5): 2'-hydroxy corresponding base
  modified_base (6)..(6): 2'-hydroxy corresponding base
  modified_base (7)..(7): 2'-hydroxy corresponding base
  modified_base (8)..(8): 2'-hydroxy corresponding base
  modified_base (9)..(9): 2'-hydroxy corresponding base
  modified_base (10)..(10): 2'-hydroxy corresponding base
  modified_base (11)..(11): 2'-hydroxy corresponding base
  modified_base (12)..(12): 2'-hydroxy corresponding base
  modified_base (13)..(13): 2'-hydroxy corresponding base
  modified_base (14)..(14): 2'-hydroxy corresponding base
  modified_base (15)..(15): 2'-hydroxy corresponding base
  modified_base (16)..(16): 2'-hydroxy corresponding base
  modified_base (17)..(17): 2'-hydroxy corresponding base
  modified_base (18)..(18): 2'-hydroxy corresponding base
  modified_base (19)..(19): 2'-hydroxy corresponding base
  modified_base (20)..(20): deoxythymidine
  modified_base (21)..(21): 5'-thio thymidine
gguagcaggcagcaccuggtt

SEQ ID NO: 663 - DNA, 21 bp, Artificial Sequence
  Description of Artificial Sequence: Synthetic oligonucleotide
  Description of Combined DNA/RNA Molecule: Synthetic oligonucleotide
  siRNAs to PCSK9
  modified_base (1)..(1): 2'-O-methyl corresponding base
  modified_base (2)..(2): 2'-O-methyl corresponding base
  modified_base (3)..(3): 2'-hydroxy corresponding base
  modified_base (4)..(4): 2'-hydroxy corresponding base
  modified_base (5)..(5): 2'-hydroxy corresponding base
  modified_base (6)..(6): 2'-O-methyl corresponding base
  modified_base (7)..(7): 2'-hydroxy corresponding base
  modified_base (8)..(8): 2'-O-methyl corresponding base
  modified_base (9)..(9): 2'-O-methyl corresponding base
  modified_base (10)..(10): 2'-hydroxy corresponding base
  modified_base (11)..(11): 2'-O-methyl corresponding base
  modified_base (12)..(12): 2'-O-methyl corresponding base
  modified_base (13)..(13): 2'-O-methyl corresponding base
  modified_base (14)..(14): 2'-hydroxy corresponding base
  modified_base (15)..(15): 2'-O-methyl corresponding base
  modified_base (16)..(16): 2'-O-methyl corresponding base
  modified_base (17)..(17): 2'-hydroxy corresponding base
  modified_base (18)..(18): 2'-O-methyl corresponding base
  modified_base (19)..(19): 2'-O-methyl corresponding base
  modified_base (20)..(20): deoxythymidine
  modified_base (21)..(21): 5'-thio thymidine
ccaggugcugccugcuacctt

SEQ ID NO: 664 - DNA, 21 bp, Artificial Sequence
  Description of Artificial Sequence: Synthetic oligonucleotide
  Description of Combined DNA/RNA Molecule: Synthetic oligonucleotide
  siRNAs to PCSK9
  modified_base (1)..(1): 2'-hydroxy corresponding base
  modified_base (2)..(2): 2'-hydroxy corresponding base
  modified_base (3)..(3): 2'-O-methyl corresponding base
  modified_base (4)..(4): 2'-hydroxy corresponding base
  modified_base (5)..(5): 2'-hydroxy corresponding base
  modified_base (6)..(6): 2'-O-methyl corresponding base
  modified_base (7)..(7): 2'-hydroxy corresponding base
  modified_base (8)..(8): 2'-hydroxy corresponding base
  modified_base (9)..(9): 2'-hydroxy corresponding base
  modified_base (10)..(10): 2'-O-methyl corresponding base
  modified_base (11)..(11): 2'-hydroxy corresponding base
  modified_base (12)..(12): 2'-hydroxy corresponding base
  modified_base (13)..(13): 2'-O-methyl corresponding base
  modified_base (14)..(14): 2'-hydroxy corresponding base
  modified_base (15)..(15): 2'-hydroxy corresponding base
  modified_base (16)..(16): 2'-hydroxy corresponding base
  modified_base (17)..(17): 2'-hydroxy corresponding base
  modified_base (18)..(18): 2'-hydroxy corresponding base
  modified_base (19)..(19): 2'-hydroxy corresponding base
  modified_base (20)..(20): deoxythymidine
  modified_base (21)..(21): 5'-thio thymidine
gguagcaggcagcaccuggtt

SEQ ID NO: 665 - DNA, 21 bp, Artificial Sequence
  Description of Artificial Sequence: Synthetic oligonucleotide
  Description of Combined DNA/RNA Molecule: Synthetic oligonucleotide
  siRNAs to PCSK9
  modified_base (1)..(1): 2'-hydroxy corresponding base
  modified_base (2)..(2): 2'-hydroxy corresponding base
  modified_base (3)..(3): 2'-hydroxy corresponding base
  modified_base (4)..(4): 2'-hydroxy corresponding base
  modified_base (5)..(5): 2'-hydroxy corresponding base
  modified_base (6)..(6): 2'-hydroxy corresponding base
  modified_base (7)..(7): 2'-hydroxy corresponding base
  modified_base (8)..(8): 2'-hydroxy corresponding base
  modified_base (9)..(9): 2'-hydroxy corresponding base
  modified_base (10)..(10): 2'-hydroxy corresponding base
  modified_base (11)..(11): 2'-hydroxy corresponding base
  modified_base (12)..(12): 2'-hydroxy corresponding base
  modified_base (13)..(13): 2'-hydroxy corresponding base
  modified_base (14)..(14): 2'-hydroxy corresponding base
  modified_base (15)..(15): 2'-hydroxy corresponding base
  modified_base (16)..(16): 2'-hydroxy corresponding base
  modified_base (17)..(17): 2'-hydroxy corresponding base
  modified_base (18)..(18): 2'-hydroxy corresponding base
  modified_base (19)..(19): 2'-hydroxy corresponding base
  modified_base (20)..(20): deoxythymidine
  modified_base (21)..(21): deoxythymidine
acccacaagccgccugugctt

SEQ ID NO: 666 - DNA, 21 bp, Artificial Sequence
  Description of Artificial Sequence: Synthetic oligonucleotide
  Description of Combined DNA/RNA Molecule: Synthetic oligonucleotide
  siRNAs to PCSK9
  modified_base (1)..(1): 2'-hydroxy corresponding base
  modified_base (2)..(2): 2'-hydroxy corresponding base
  modified_base (3)..(3): 2'-hydroxy corresponding base
  modified_base (4)..(4): 2'-hydroxy corresponding base
  modified_base (5)..(5): 2'-hydroxy corresponding base
  modified_base (6)..(6): 2'-hydroxy corresponding base
  modified_base (7)..(7): 2'-hydroxy corresponding base
  modified_base (8)..(8): 2'-hydroxy corresponding base
  modified_base (9)..(9): 2'-hydroxy corresponding base
  modified_base (10)..(10): 2'-hydroxy corresponding base
  modified_base (11)..(11): 2'-hydroxy corresponding base
  modified_base (12)..(12): 2'-hydroxy corresponding base
  modified_base (13)..(13): 2'-hydroxy corresponding base
  modified_base (14)..(14): 2'-hydroxy corresponding base
  modified_base (15)..(15): 2'-hydroxy corresponding base
  modified_base (16)..(16): 2'-hydroxy corresponding base
  modified_base (17)..(17): 2'-hydroxy corresponding base
  modified_base (18)..(18): 2'-hydroxy corresponding base
  modified_base (19)..(19): 2'-hydroxy corresponding base
  modified_base (20)..(20): deoxythymidine
  modified_base (21)..(21): deoxythymidine
gcacaggcggcuugugggutt

SEQ ID NO: 667 - DNA, 21 bp, Artificial Sequence
  Description of Artificial Sequence: Synthetic oligonucleotide
  Description of Combined DNA/RNA Molecule: Synthetic oligonucleotide
  siRNAs to PCSK9
  modified_base (1)..(1): 2'-hydroxy corresponding base
  modified_base (2)..(2): 2'-hydroxy corresponding base
  modified_base (3)..(3): 2'-hydroxy corresponding base
  modified_base (4)..(4): 2'-hydroxy corresponding base
  modified_base (5)..(5): 2'-hydroxy corresponding base
  modified_base (6)..(6): 2'-hydroxy corresponding base
  modified_base (7)..(7): 2'-hydroxy corresponding base
  modified_base (8)..(8): 2'-hydroxy corresponding base
  modified_base (9)..(9): 2'-hydroxy corresponding base
  modified_base (10)..(10): 2'-hydroxy corresponding base
  modified_base (11)..(11): 2'-hydroxy corresponding base
  modified_base (12)..(12): 2'-hydroxy corresponding base
  modified_base (13)..(13): 2'-hydroxy corresponding base
  modified_base (14)..(14): 2'-hydroxy corresponding base
  modified_base (15)..(15): 2'-hydroxy corresponding base
  modified_base (16)..(16): 2'-hydroxy corresponding base
  modified_base (17)..(17): 2'-hydroxy corresponding base
  modified_base (18)..(18): 2'-hydroxy corresponding base
  modified_base (19)..(19): 2'-hydroxy corresponding base
  modified_base (20)..(20): deoxythymidine
  modified_base (21)..(21): 5'-thio thymidine
gugcugaggccacgagguctt

SEQ ID NO: 668 - DNA, 21 bp, Artificial Sequence
  Description of Artificial Sequence: Synthetic oligonucleotide
  Description of Combined DNA/RNA Molecule: Synthetic oligonucleotide
  siRNAs to PCSK9
  modified_base (1)..(1): 2'-hydroxy corresponding base
  modified_base (2)..(2): 2'-hydroxy corresponding base
  modified_base (3)..(3): 2'-hydroxy corresponding base
  modified_base (4)..(4): 2'-hydroxy corresponding base
  modified_base (5)..(5): 2'-hydroxy corresponding base
  modified_base (6)..(6): 2'-hydroxy corresponding base
  modified_base (7)..(7): 2'-hydroxy corresponding base
  modified_base (8)..(8): 2'-hydroxy corresponding base
  modified_base (9)..(9): 2'-hydroxy corresponding base
  modified_base (10)..(10): 2'-hydroxy corresponding base
  modified_base (11)..(11): 2'-hydroxy corresponding base
  modified_base (12)..(12): 2'-hydroxy corresponding base
  modified_base (13)..(13): 2'-hydroxy corresponding base
  modified_base (14)..(14): 2'-hydroxy corresponding base
  modified_base (15)..(15): 2'-hydroxy corresponding base
  modified_base (16)..(16): 2'-hydroxy corresponding base
  modified_base (17)..(17): 2'-hydroxy corresponding base
  modified_base (18)..(18): 2'-hydroxy corresponding base
  modified_base (19)..(19): 2'-hydroxy corresponding base
  modified_base (20)..(20): deoxythymidine
  modified_base (21)..(21): 5'-thio thymidine
gaccucguggccucagcactt

SEQ ID NO: 669 - DNA, 21 bp, Artificial Sequence
  Description of Artificial Sequence: Synthetic oligonucleotide
  Description of Combined DNA/RNA Molecule: Synthetic oligonucleotide
  siRNAs to PCSK9
  modified_base (1)..(1): 2'-hydroxy corresponding base
  modified_base (2)..(2): 2'-O-methyl corresponding base
  modified_base (3)..(3): 2'-hydroxy corresponding base
  modified_base (4)..(4): 2'-O-methyl corresponding base
  modified_base (5)..(5): 2'-O-methyl corresponding base
  modified_base (6)..(6): 2'-hydroxy corresponding base
  modified_base (7)..(7): 2'-hydroxy corresponding base
  modified_base (8)..(8): 2'-hydroxy corresponding base
  modified_base (9)..(9): 2'-hydroxy corresponding base
  modified_base (10)..(10): 2'-O-methyl corresponding base
  modified_base (11)..(11): 2'-O-methyl corresponding base
  modified_base (12)..(12): 2'-hydroxy corresponding base
  modified_base (13)..(13): 2'-O-methyl corresponding base
  modified_base (14)..(14): 2'-hydroxy corresponding base
  modified_base (15)..(15): 2'-hydroxy corresponding base
  modified_base (16)..(16): 2'-hydroxy corresponding base
  modified_base (17)..(17): 2'-hydroxy corresponding base
  modified_base (18)..(18): 2'-O-methyl corresponding base
  modified_base (19)..(19): 2'-O-methyl corresponding base
  modified_base (20)..(20): deoxythymidine
  modified_base (21)..(21): 5'-thio thymidine
gugcugaggccacgagguctt

SEQ ID NO: 670 - DNA, 21 bp, Artificial Sequence
  Description of Artificial Sequence: Synthetic oligonucleotide
  Description of Combined DNA/RNA Molecule: Synthetic oligonucleotide
  siRNAs to PCSK9
  modified_base (1)..(1): 2'-hydroxy corresponding base
  modified_base (2)..(2): 2'-hydroxy corresponding base
  modified_base (3)..(3): 2'-hydroxy corresponding base
  modified_base (4)..(4): 2'-hydroxy corresponding base
  modified_base (5)..(5): 2'-hydroxy corresponding base
  modified_base (6)..(6): 2'-hydroxy corresponding base
  modified_base (7)..(7): 2'-hydroxy corresponding base
  modified_base (8)..(8): 2'-hydroxy corresponding base
  modified_base (9)..(9): 2'-hydroxy corresponding base
  modified_base (10)..(10): 2'-hydroxy corresponding base
  modified_base (11)..(11): 2'-hydroxy corresponding base
  modified_base (12)..(12): 2'-hydroxy corresponding base
  modified_base (13)..(13): 2'-hydroxy corresponding base
  modified_base (14)..(14): 2'-O-methyl corresponding base
  modified_base (15)..(15): 2'-hydroxy corresponding base
  modified_base (16)..(16): 2'-hydroxy corresponding base
  modified_base (17)..(17): 2'-O-methyl corresponding base
  modified_base (18)..(18): 2'-hydroxy corresponding base
  modified_base (19)..(19): 2'-hydroxy corresponding base
  modified_base (20)..(20): deoxythymidine
  modified_base (21)..(21): 5'-thio thymidine
gaccucguggccucagcactt

SEQ ID NO: 671 - DNA, 21 bp, Artificial Sequence
  Description of Artificial Sequence: Synthetic oligonucleotide
  Description of Combined DNA/RNA Molecule: Synthetic oligonucleotide
  siRNAs to PCSK9
  modified_base (1)..(1): 2'-hydroxy corresponding base
  modified_base (2)..(2): 2'-hydroxy corresponding base
  modified_base (3)..(3): 2'-hydroxy corresponding base
  modified_base (4)..(4): 2'-hydroxy corresponding base
  modified_base (5)..(5): 2'-hydroxy corresponding base
  modified_base (6)..(6): 2'-hydroxy corresponding base
  modified_base (7)..(7): 2'-hydroxy corresponding base
  modified_base (8)..(8): 2'-hydroxy corresponding base
  modified_base (9)..(9): 2'-hydroxy corresponding base
  modified_base (10)..(10): 2'-hydroxy corresponding base
  modified_base (11)..(11): 2'-hydroxy corresponding base
  modified_base (12)..(12): 2'-hydroxy corresponding base
  modified_base (13)..(13): 2'-hydroxy corresponding base
  modified_base (14)..(14): 2'-hydroxy corresponding base
  modified_base (15)..(15): 2'-hydroxy corresponding base
  modified_base (16)..(16): 2'-hydroxy corresponding base
  modified_base (17)..(17): 2'-hydroxy corresponding base
  modified_base (18)..(18): 2'-hydroxy corresponding base
  modified_base (19)..(19): 2'-hydroxy corresponding base
  modified_base (20)..(20): deoxythymidine
  modified_base (21)..(21): 5'-thio thymidine
ugcugaggccacgaggucatt

SEQ ID NO: 672 - DNA, 21 bp, Artificial Sequence
  Description of Artificial Sequence: Synthetic oligonucleotide
  Description of Combined DNA/RNA Molecule: Synthetic oligonucleotide
  siRNAs to PCSK9
  modified_base (1)..(1): 2'-hydroxy corresponding base
  modified_base (2)..(2): 2'-hydroxy corresponding base
  modified_base (3)..(3): 2'-hydroxy corresponding base
  modified_base (4)..(4): 2'-hydroxy corresponding base
  modified_base (5)..(5): 2'-hydroxy corresponding base
  modified_base (6)..(6): 2'-hydroxy corresponding base
  modified_base (7)..(7): 2'-hydroxy corresponding base
  modified_base (8)..(8): 2'-hydroxy corresponding base
  modified_base (9)..(9): 2'-hydroxy corresponding base
  modified_base (10)..(10): 2'-hydroxy corresponding base
  modified_base (11)..(11): 2'-hydroxy corresponding base
  modified_base (12)..(12): 2'-hydroxy corresponding base
  modified_base (13)..(13): 2'-hydroxy corresponding base
  modified_base (14)..(14): 2'-hydroxy corresponding base
  modified_base (15)..(15): 2'-hydroxy corresponding base
  modified_base (16)..(16): 2'-hydroxy corresponding base
  modified_base (17)..(17): 2'-hydroxy corresponding base
  modified_base (18)..(18): 2'-hydroxy corresponding base
  modified_base (19)..(19): 2'-hydroxy corresponding base
  modified_base (20)..(20): deoxythymidine
  modified_base (21)..(21): 5'-thio thymidine
ugaccucguggccucagcatt

SEQ ID NO: 673 - DNA, 21 bp, Artificial Sequence
  Description of Artificial Sequence: Synthetic oligonucleotide
  Description of Combined DNA/RNA Molecule: Synthetic oligonucleotide
  siRNAs to PCSK9
  modified_base (1)..(1): 2'-hydroxy corresponding base
  modified_base (2)..(2): 2'-hydroxy corresponding base
  modified_base (3)..(3): 2'-hydroxy corresponding base
  modified_base (4)..(4): 2'-hydroxy corresponding base
  modified_base (5)..(5): 2'-hydroxy corresponding base
  modified_base (6)..(6): 2'-hydroxy corresponding base
  modified_base (7)..(7): 2'-hydroxy corresponding base
  modified_base (8)..(8): 2'-hydroxy corresponding base
  modified_base (9)..(9): 2'-hydroxy corresponding base
  modified_base (10)..(10): 2'-hydroxy corresponding base
  modified_base (11)..(11): 2'-hydroxy corresponding base
  modified_base (12)..(12): 2'-hydroxy corresponding base
  modified_base (13)..(13): 2'-hydroxy corresponding base
  modified_base (14)..(14): 2'-hydroxy corresponding base
  modified_base (15)..(15): 2'-hydroxy corresponding base
  modified_base (16)..(16): 2'-hydroxy corresponding base
  modified_base (17)..(17): 2'-hydroxy corresponding base
  modified_base (18)..(18): 2'-hydroxy corresponding base
  modified_base (19)..(19): 2'-hydroxy corresponding base
  modified_base (20)..(20): deoxythymidine
  modified_base (21)..(21): 5'-thio thymidine
ugcugaggccacgaggucatt

SEQ ID NO: 674 - DNA, 21 bp, Artificial Sequence
  Description of Artificial Sequence: Synthetic oligonucleotide
  Description of Combined DNA/RNA Molecule: Synthetic oligonucleotide
  siRNAs to PCSK9
  modified_base (1)..(1): 2'-hydroxy corresponding base
  modified_base (2)..(2): 2'-hydroxy corresponding base
  modified_base (3)..(3): 2'-hydroxy corresponding base
  modified_base (4)..(4): 2'-hydroxy corresponding base
  modified_base (5)..(5): 2'-hydroxy corresponding base
  modified_base (6)..(6): 2'-hydroxy corresponding base
  modified_base (7)..(7): 2'-hydroxy corresponding base
  modified_base (8)..(8): 2'-hydroxy corresponding base
  modified_base (9)..(9): 2'-hydroxy corresponding base
  modified_base (10)..(10): 2'-hydroxy corresponding base
  modified_base (11)..(11): 2'-hydroxy corresponding base
  modified_base (12)..(12): 2'-hydroxy corresponding base
  modified_base (13)..(13): 2'-hydroxy corresponding base
  modified_base (14)..(14): 2'-hydroxy corresponding base
  modified_base (15)..(15): 2'-hydroxy corresponding base
  modified_base (16)..(16): 2'-hydroxy corresponding base
  modified_base (17)..(17): 2'-hydroxy corresponding base
  modified_base (18)..(18): 2'-hydroxy corresponding base
  modified_base (19)..(19): 2'-hydroxy corresponding base
  modified_base (20)..(20): deoxythymidine
  modified_base (21)..(21): 5'-thio thymidine
ugaccucguggccucagcatt

SEQ ID NO: 675 - DNA, 21 bp, Artificial Sequence
  Description of Artificial Sequence: Synthetic oligonucleotide
  Description of Combined DNA/RNA Molecule: Synthetic oligonucleotide
  siRNAs to PCSK9
  modified_base (1)..(1): 2'-O-methyl corresponding base
  modified_base (2)..(2): 2'-hydroxy corresponding base
  modified_base (3)..(3): 2'-O-methyl corresponding base
  modified_base (4)..(4): 2'-O-methyl corresponding base
  modified_base (5)..(5): 2'-hydroxy corresponding base
  modified_base (6)..(6): 2'-hydroxy corresponding base
  modified_base (7)..(7): 2'-hydroxy corresponding base
  modified_base (8)..(8): 2'-hydroxy corresponding base
  modified_base (9)..(9): 2'-O-methyl corresponding base
  modified_base (10)..(10): 2'-O-methyl corresponding base
  modified_base (11)..(11): 2'-hydroxy corresponding base
  modified_base (12)..(12): 2'-O-methyl corresponding base
  modified_base (13)..(13): 2'-hydroxy corresponding base
  modified_base (14)..(14): 2'-hydroxy corresponding base
  modified_base (15)..(15): 2'-hydroxy corresponding base
  modified_base (16)..(16): 2'-hydroxy corresponding base
  modified_base (17)..(17): 2'-O-methyl corresponding base
  modified_base (18)..(18): 2'-O-methyl corresponding base
  modified_base (19)..(19): 2'-hydroxy corresponding base
  modified_base (20)..(20): deoxythymidine
  modified_base (21)..(21): 5'-thio thymidine
ugcugaggccacgaggucatt

SEQ ID NO: 676 - DNA, 21 bp, Artificial Sequence
  Description of Artificial Sequence: Synthetic oligonucleotide
  Description of Combined DNA/RNA Molecule: Synthetic oligonucleotide
  siRNAs to PCSK9
  modified_base (1)..(1): 2'-hydroxy corresponding base
  modified_base (2)..(2): 2'-hydroxy corresponding base
  modified_base (3)..(3): 2'-hydroxy corresponding base
  modified_base (4)..(4): 2'-hydroxy corresponding base
  modified_base (5)..(5): 2'-hydroxy corresponding base
  modified_base (6)..(6): 2'-hydroxy corresponding base
  modified_base (7)..(7): 2'-hydroxy corresponding base
  modified_base (8)..(8): 2'-hydroxy corresponding base
  modified_base (9)..(9): 2'-hydroxy corresponding base
  modified_base (10)..(10): 2'-hydroxy corresponding base
  modified_base (11)..(11): 2'-hydroxy corresponding base
  modified_base (12)..(12): 2'-hydroxy corresponding base
  modified_base (13)..(13): 2'-hydroxy corresponding base
  modified_base (14)..(14): 2'-hydroxy corresponding base
  modified_base (15)..(15): 2'-O-methyl corresponding base
  modified_base (16)..(16): 2'-hydroxy corresponding base
  modified_base (17)..(17): 2'-hydroxy corresponding base
  modified_base (18)..(18): 2'-O-methyl corresponding base
  modified_base (19)..(19): 2'-hydroxy corresponding base
  modified_base (20)..(20): deoxythymidine
  modified_base (21)..(21): 5'-thio thymidine
ugaccucguggccucagcatt

SEQ ID NO: 677 - DNA, 21 bp, Artificial Sequence
  Description of Artificial Sequence: Synthetic oligonucleotide
  Description of Combined DNA/RNA Molecule: Synthetic oligonucleotide
  siRNAs to PCSK9
  modified_base (1)..(1): 2'-deoxy-2'-fluoro corresponding base
  modified_base (2)..(2): 2'-O-methyl corresponding base
  modified_base (3)..(3): 2'-deoxy-2'-fluoro corresponding base
  modified_base (4)..(4): 2'-O-methyl corresponding base
  modified_base (5)..(5): 2'-deoxy-2'-fluoro corresponding base
  modified_base (6)..(6): 2'-O-methyl corresponding base
  modified_base (7)..(7): 2'-deoxy-2'-fluoro corresponding base
  modified_base (8)..(8): 2'-O-methyl corresponding base
  modified_base (9)..(9): 2'-deoxy-2'-fluoro corresponding base
  modified_base (10)..(10): 2'-O-methyl corresponding base
  modified_base (11)..(11): 2'-deoxy-2'-fluoro corresponding base
  modified_base (12)..(12): 2'-O-methyl corresponding base
  modified_base (13)..(13): 2'-deoxy-2'-fluoro corresponding base
  modified_base (14)..(14): 2'-O-methyl corresponding base
  modified_base (15)..(15): 2'-deoxy-2'-fluoro corresponding base
  modified_base (16)..(16): 2'-O-methyl corresponding base
  modified_base (17)..(17): 2'-deoxy-2'-fluoro corresponding base
  modified_base (18)..(18): 2'-O-methyl corresponding base
  modified_base (19)..(19): 2'-deoxy-2'-fluoro corresponding base
  modified_base (20)..(20): deoxythymidine
  modified_base (21)..(21): 5'-thio thymidine
ugcugaggccacgaggucatt

SEQ ID NO: 678 - DNA, 21 bp, Artificial Sequence
  Description of Artificial Sequence: Synthetic oligonucleotide
  Description of Combined DNA/RNA Molecule: Synthetic oligonucleotide
  siRNAs to PCSK9
  modified_base (1)..(1): 2'-O-methyl corresponding base
  modified_base (2)..(2): 2'-deoxy-2'-fluoro corresponding base
  modified_base (3)..(3): 2'-O-methyl corresponding base
  modified_base (4)..(4): 2'-deoxy-2'-fluoro corresponding base
  modified_base (5)..(5): 2'-O-methyl corresponding base
  modified_base (6)..(6): 2'-deoxy-2'-fluoro corresponding base
  modified_base (7)..(7): 2'-O-methyl corresponding base
  modified_base (8)..(8): 2'-deoxy-2'-fluoro corresponding base
  modified_base (9)..(9): 2'-O-methyl corresponding base
  modified_base (10)..(10): 2'-deoxy-2'-fluoro corresponding base
  modified_base (11)..(11): 2'-O-methyl corresponding base
  modified_base (12)..(12): 2'-deoxy-2'-fluoro corresponding base
  modified_base (13)..(13): 2'-O-methyl corresponding base
  modified_base (14)..(14): 2'-deoxy-2'-fluoro corresponding base
  modified_base (15)..(15): 2'-O-methyl corresponding base
  modified_base (16)..(16): 2'-deoxy-2'-fluoro corresponding base
  modified_base (17)..(17): 2'-O-methyl corresponding base
  modified_base (18)..(18): 2'-deoxy-2'-fluoro corresponding base
  modified_base (19)..(19): 2'-O-methyl corresponding base
  modified_base (20)..(20): deoxythymidine
  modified_base (21)..(21): 5'-thio thymidine
ugaccucguggccucagcatt

SEQ ID NO: 679 - DNA, 21 bp, Artificial Sequence
  Description of Artificial Sequence: Synthetic oligonucleotide
  Description of Combined DNA/RNA Molecule: Synthetic oligonucleotide
  siRNAs to PCSK9
  modified_base (1)..(1): 2'-deoxy-2'-fluoro corresponding base
  modified_base (2)..(2): 2'-hydroxy corresponding base
  modified_base (3)..(3): 2'-deoxy-2'-fluoro corresponding base
  modified_base (4)..(4): 2'-deoxy-2'-fluoro corresponding base
  modified_base (5)..(5): 2'-hydroxy corresponding base
  modified_base (6)..(6): 2'-hydroxy corresponding base
  modified_base (7)..(7): 2'-hydroxy corresponding base
  modified_base (8)..(8): 2'-hydroxy corresponding base
  modified_base (9)..(9): 2'-deoxy-2'-fluoro corresponding base
  modified_base (10)..(10): 2'-deoxy-2'-fluoro corresponding base
  modified_base (11)..(11): 2'-hydroxy corresponding base
  modified_base (12)..(12): 2'-deoxy-2'-fluoro corresponding base
  modified_base (13)..(13): 2'-hydroxy corresponding base
  modified_base (14)..(14): 2'-hydroxy corresponding base
  modified_base (15)..(15): 2'-hydroxy corresponding base
  modified_base (16)..(16): 2'-hydroxy corresponding base
  modified_base (17)..(17): 2'-deoxy-2'-fluoro corresponding base
  modified_base (18)..(18): 2'-deoxy-2'-fluoro corresponding base
  modified_base (19)..(19): 2'-hydroxy corresponding base
  modified_base (20)..(20): deoxythymidine
  modified_base (21)..(21): 5'-thio thymidine
ugcugaggccacgaggucatt

SEQ ID NO: 680 - DNA, 21 bp, Artificial Sequence
  Description of Artificial Sequence: Synthetic oligonucleotide
  Description of Combined DNA/RNA Molecule: Synthetic oligonucleotide
  siRNAs to PCSK9
  modified_base (1)..(1): 2'-deoxy-2'-fluoro corresponding base
  modified_base (2)..(2): 2'-hydroxy corresponding base
  modified_base (3)..(3): 2'-hydroxy corresponding base
  modified_base (4)..(4): 2'-deoxy-2'-fluoro corresponding base
  modified_base (5)..(5): 2'-deoxy-2'-fluoro corresponding base
  modified_base (6)..(6): 2'-deoxy-2'-fluoro corresponding base
  modified_base (7)..(7): 2'-deoxy-2'-fluoro corresponding base
  modified_base (8)..(8): 2'-hydroxy corresponding base
  modified_base (9)..(9): 2'-deoxy-2'-fluoro corresponding base
  modified_base (10)..(10): 2'-hydroxy corresponding base
  modified_base (11)..(11): 2'-hydroxy corresponding base
  modified_base (12)..(12): 2'-deoxy-2'-fluoro corresponding base
  modified_base (13)..(13): 2'-deoxy-2'-fluoro corresponding base
  modified_base (14)..(14): 2'-deoxy-2'-fluoro corresponding base
  modified_base (15)..(15): 2'-deoxy-2'-fluoro corresponding base
  modified_base (16)..(16): 2'-hydroxy corresponding base
  modified_base (17)..(17): 2'-hydroxy corresponding base
  modified_base (18)..(18): 2'-deoxy-2'-fluoro corresponding base
  modified_base (19)..(19): 2'-hydroxy corresponding base
  modified_base (20)..(20): deoxythymidine
  modified_base (21)..(21): 5'-thio thymidine
ugaccucguggccucagcatt

SEQ ID NO: 681 - DNA, 21 bp, Artificial Sequence
  Description of Artificial Sequence: Synthetic oligonucleotide
  Description of Combined DNA/RNA Molecule: Synthetic oligonucleotide
  siRNAs to PCSK9
  modified_base (1)..(1): 2'-hydroxy corresponding base
  modified_base (2)..(2): 2'-O-methyl corresponding base
  modified_base (3)..(3): 2'-hydroxy corresponding base
  modified_base (4)..(4): 2'-O-methyl corresponding base
  modified_base (5)..(5): 2'-hydroxy corresponding base
  modified_base (6)..(6): 2'-O-methyl corresponding base
  modified_base (7)..(7): 2'-hydroxy corresponding base
  modified_base (8)..(8): 2'-O-methyl corresponding base
  modified_base (9)..(9): 2'-hydroxy corresponding base
  modified_base (10)..(10): 2'-O-methyl corresponding base
  modified_base (11)..(11): 2'-hydroxy corresponding base
  modified_base (12)..(12): 2'-O-methyl corresponding base
  modified_base (13)..(13): 2'-hydroxy corresponding base
  modified_base (14)..(14): 2'-O-methyl corresponding base
  modified_base (15)..(15): 2'-hydroxy corresponding base
  modified_base (16)..(16): 2'-O-methyl corresponding base
  modified_base (17)..(17): 2'-hydroxy corresponding base
  modified_base (18)..(18): 2'-O-methyl corresponding base
  modified_base (19)..(19): 2'-hydroxy corresponding base
  modified_base (20)..(20): deoxythymidine
  modified_base (21)..(21): 5'-thio thymidine
ugcugaggccacgaggucatt

SEQ ID NO: 682 - DNA, 21 bp, Artificial Sequence
  Description of Artificial Sequence: Synthetic oligonucleotide
  Description of Combined DNA/RNA Molecule: Synthetic oligonucleotide
  siRNAs to PCSK9
  modified_base (1)..(1): 2'-O-methyl corresponding base
  modified_base (2)..(2): 2'-deoxy-2'-fluoro corresponding base
  modified_base (3)..(3): 2'-O-methyl corresponding base
  modified_base (4)..(4): 2'-deoxy-2'-fluoro corresponding base
  modified_base (5)..(5): 2'-O-methyl corresponding base
  modified_base (6)..(6): 2'-deoxy-2'-fluoro corresponding base
  modified_base (7)..(7): 2'-O-methyl corresponding base
  modified_base (8)..(8): 2'-deoxy-2'-fluoro corresponding base
  modified_base (9)..(9): 2'-O-methyl corresponding base
  modified_base (10)..(10): 2'-deoxy-2'-fluoro corresponding base
  modified_base (11)..(11): 2'-O-methyl corresponding base
  modified_base (12)..(12): 2'-deoxy-2'-fluoro corresponding base
  modified_base (13)..(13): 2'-O-methyl corresponding base
  modified_base (14)..(14): 2'-deoxy-2'-fluoro corresponding base
  modified_base (15)..(15): 2'-O-methyl corresponding base
  modified_base (16)..(16): 2'-deoxy-2'-fluoro corresponding base
  modified_base (17)..(17): 2'-O-methyl corresponding base
  modified_base (18)..(18): 2'-deoxy-2'-fluoro corresponding base
  modified_base (19)..(19): 2'-O-methyl corresponding base
  modified_base (20)..(20): deoxythymidine
  modified_base (21)..(21): 5'-thio thymidine
ugaccucguggccucagcatt

SEQ ID NO: 683 - DNA, 21 bp, Artificial Sequence
  Description of Artificial Sequence: Synthetic oligonucleotide
  Description of Combined DNA/RNA Molecule: Synthetic oligonucleotide
  siRNAs to PCSK9
  modified_base (1)..(1): 2'-hydroxy corresponding base
  modified_base (2)..(2): 2'-O-methyl corresponding base
  modified_base (3)..(3): 2'-hydroxy corresponding base
  modified_base (4)..(4): 2'-O-methyl corresponding base
  modified_base (5)..(5): 2'-hydroxy corresponding base
  modified_base (6)..(6): 2'-O-methyl corresponding base
  modified_base (7)..(7): 2'-hydroxy corresponding base
  modified_base (8)..(8): 2'-O-methyl corresponding base
  modified_base (9)..(9): 2'-hydroxy corresponding base
  modified_base (10)..(10): 2'-O-methyl corresponding base
  modified_base (11)..(11): 2'-hydroxy corresponding base
  modified_base (12)..(12): 2'-O-methyl corresponding base
  modified_base (13)..(13): 2'-hydroxy corresponding base
  modified_base (14)..(14): 2'-O-methyl corresponding base
  modified_base (15)..(15): 2'-hydroxy corresponding base
  modified_base (16)..(16): 2'-O-methyl corresponding base
  modified_base (17)..(17): 2'-hydroxy corresponding base
  modified_base (18)..(18): 2'-O-methyl corresponding base
  modified_base (19)..(19): 2'-hydroxy corresponding base
  modified_base (20)..(20): deoxythymidine
  modified_base (21)..(21): 5'-thio thymidine
ugcugaggccacgaggucatt

SEQ ID NO: 684 - DNA, 21 bp, Artificial Sequence
  Description of Artificial Sequence: Synthetic oligonucleotide
  Description of Combined DNA/RNA Molecule: Synthetic oligonucleotide
  siRNAs to PCSK9
  modified_base (1)..(1): 2'-deoxy-2'-fluoro corresponding base
  modified_base (2)..(2): 2'-hydroxy corresponding base
  modified_base (3)..(3): 2'-hydroxy corresponding base
  modified_base (4)..(4): 2'-deoxy-2'-fluoro corresponding base
  modified_base (5)..(5): 2'-deoxy-2'-fluoro corresponding base
  modified_base (6)..(6): 2'-deoxy-2'-fluoro corresponding base
  modified_base (7)..(7): 2'-deoxy-2'-fluoro corresponding base
  modified_base (8)..(8): 2'-hydroxy corresponding base
  modified_base (9)..(9): 2'-deoxy-2'-fluoro corresponding base
  modified_base (10)..(10): 2'-hydroxy corresponding base
  modified_base (11)..(11): 2'-hydroxy corresponding base
  modified_base (12)..(12): 2'-deoxy-2'-fluoro corresponding base
  modified_base (13)..(13): 2'-deoxy-2'-fluoro corresponding base
  modified_base (14)..(14): 2'-deoxy-2'-fluoro corresponding base
  modified_base (15)..(15): 2'-deoxy-2'-fluoro corresponding base
  modified_base (16)..(16): 2'-hydroxy corresponding base
  modified_base (17)..(17): 2'-hydroxy corresponding base
  modified_base (18)..(18): 2'-deoxy-2'-fluoro corresponding base
  modified_base (19)..(19): 2'-hydroxy corresponding base
  modified_base (20)..(20): deoxythymidine
  modified_base (21)..(21): 5'-thio thymidine
ugaccucguggccucagcatt

SEQ ID NO: 685 - DNA, 21 bp, Artificial Sequence
  Description of Artificial Sequence: Synthetic oligonucleotide
  Description of Combined DNA/RNA Molecule: Synthetic oligonucleotide
  siRNAs to PCSK9
  modified_base (1)..(1): 2'-deoxy-2'-fluoro corresponding base
  modified_base (2)..(2): 2'-O-methyl corresponding base
  modified_base (3)..(3): 2'-deoxy-2'-fluoro corresponding base
  modified_base (4)..(4): 2'-O-methyl corresponding base
  modified_base (5)..(5): 2'-deoxy-2'-fluoro corresponding base
  modified_base (6)..(6): 2'-O-methyl corresponding base
  modified_base (7)..(7): 2'-deoxy-2'-fluoro corresponding base
  modified_base (8)..(8): 2'-O-methyl corresponding base
  modified_base (9)..(9): 2'-deoxy-2'-fluoro corresponding base
  modified_base (10)..(10): 2'-O-methyl corresponding base
  modified_base (11)..(11): 2'-deoxy-2'-fluoro corresponding base
  modified_base (12)..(12): 2'-O-methyl corresponding base
  modified_base (13)..(13): 2'-deoxy-2'-fluoro corresponding base
  modified_base (14)..(14): 2'-O-methyl corresponding base
  modified_base (15)..(15): 2'-deoxy-2'-fluoro corresponding base
  modified_base (16)..(16): 2'-O-methyl corresponding base
  modified_base (17)..(17): 2'-deoxy-2'-fluoro corresponding base
  modified_base (18)..(18): 2'-O-methyl corresponding base
  modified_base (19)..(19): 2'-deoxy-2'-fluoro corresponding base
  modified_base (20)..(20): deoxythymidine
  modified_base (21)..(21): 5'-thio thymidine
ugcugaggccacgaggucatt

SEQ ID NO: 686 - DNA, 21 bp, Artificial Sequence
  Description of Artificial Sequence: Synthetic oligonucleotide
  Description of Combined DNA/RNA Molecule: Synthetic oligonucleotide
  siRNAs to PCSK9
  modified_base (1)..(1): 2'-hydroxy corresponding base
  modified_base (2)..(2): 2'-hydroxy corresponding base
  modified_base (3)..(3): 2'-hydroxy corresponding base
  modified_base (4)..(4): 2'-hydroxy corresponding base
  modified_base (5)..(5): 2'-hydroxy corresponding base
  modified_base (6)..(6): 2'-O-methyl corresponding base
  modified_base (7)..(7): 2'-O-methyl corresponding base
  modified_base (8)..(8): 2'-hydroxy corresponding base
  modified_base (9)..(9): 2'-hydroxy corresponding base
  modified_base (10)..(10): 2'-O-methyl corresponding base
  modified_base (11)..(11): 2'-O-methyl corresponding base
  modified_base (12)..(12): 2'-hydroxy corresponding base
  modified_base (13)..(13): 2'-hydroxy corresponding base
  modified_base (14)..(14): 2'-hydroxy corresponding base
  modified_base (15)..(15): 2'-hydroxy corresponding base
  modified_base (16)..(16): 2'-hydroxy corresponding base
  modified_base (17)..(17): 2'-O-methyl corresponding base
  modified_base (18)..(18): 2'-O-methyl corresponding base
  modified_base (19)..(19): 2'-O-methyl corresponding base
  modified_base (20)..(20): deoxythymidine
  modified_base (21)..(21): 5'-thio thymidine
ugaccucguggccucagcatt

SEQ ID NO: 687 - DNA, 21 bp, Artificial Sequence
  Description of Artificial Sequence: Synthetic oligonucleotide
  Description of Combined DNA/RNA Molecule: Synthetic oligonucleotide
  siRNAs to PCSK9
  modified_base (1)..(1): 2'-deoxy-2'-fluoro corresponding base
  modified_base (2)..(2): 2'-hydroxy corresponding base
  modified_base (3)..(3): 2'-deoxy-2'-fluoro corresponding base
  modified_base (4)..(4): 2'-deoxy-2'-fluoro corresponding base
  modified_base (5)..(5): 2'-hydroxy corresponding base
  modified_base (6)..(6): 2'-hydroxy corresponding base
  modified_base (7)..(7): 2'-hydroxy corresponding base
  modified_base (8)..(8): 2'-hydroxy corresponding base
  modified_base (9)..(9): 2'-deoxy-2'-fluoro corresponding base
  modified_base (10)..(10): 2'-deoxy-2'-fluoro corresponding base
  modified_base (11)..(11): 2'-hydroxy corresponding base
  modified_base (12)..(12): 2'-deoxy-2'-fluoro corresponding base
  modified_base (13)..(13): 2'-hydroxy corresponding base
  modified_base (14)..(14): 2'-hydroxy corresponding base
  modified_base (15)..(15): 2'-hydroxy corresponding base
  modified_base (16)..(16): 2'-hydroxy corresponding base
  modified_base (17)..(17): 2'-deoxy-2'-fluoro corresponding base
  modified_base (18)..(18): 2'-deoxy-2'-fluoro corresponding base
  modified_base (19)..(19): 2'-hydroxy corresponding base
  modified_base (20)..(20): deoxythymidine
  modified_base (21)..(21): 5'-thio thymidine
ugcugaggccacgaggucatt

SEQ ID NO: 688 - DNA, 21 bp, Artificial Sequence
  Description of Artificial Sequence: Synthetic oligonucleotide
  Description of Combined DNA/RNA Molecule: Synthetic oligonucleotide
  siRNAs to PCSK9
  modified_base (1)..(1): 2'-hydroxy corresponding base
  modified_base (2)..(2): 2'-hydroxy corresponding base
  modified_base (3)..(3): 2'-hydroxy corresponding base
  modified_base (4)..(4): 2'-hydroxy corresponding base
  modified_base (5)..(5): 2'-hydroxy corresponding base
  modified_base (6)..(6): 2'-O-methyl corresponding base
  modified_base (7)..(7): 2'-O-methyl corresponding base
  modified_base (8)..(8): 2'-hydroxy corresponding base
  modified_base (9)..(9): 2'-hydroxy corresponding base
  modified_base (10)..(10): 2'-O-methyl corresponding base
  modified_base (11)..(11): 2'-O-methyl corresponding base
  modified_base (12)..(12): 2'-hydroxy corresponding base
  modified_base (13)..(13): 2'-hydroxy corresponding base
  modified_base (14)..(14): 2'-hydroxy corresponding base
  modified_base (15)..(15): 2'-hydroxy corresponding base
  modified_base (16)..(16): 2'-hydroxy corresponding base
  modified_base (17)..(17): 2'-O-methyl corresponding base
  modified_base (18)..(18): 2'-O-methyl corresponding base
  modified_base (19)..(19): 2'-O-methyl corresponding base
  modified_base (20)..(20): deoxythymidine
  modified_base (21)..(21): 5'-thio thymidine
ugaccucguggccucagcatt

SEQ ID NO: 689 - DNA, 21 bp, Artificial Sequence
  Description of Artificial Sequence: Synthetic oligonucleotide
  Description of Combined DNA/RNA Molecule: Synthetic oligonucleotide
  siRNAs to PCSK9
  modified_base (1)..(1): 2'-hydroxy corresponding base
  modified_base (2)..(2): 2'-O-methyl corresponding base
  modified_base (3)..(3): 2'-hydroxy corresponding base
  modified_base (4)..(4): 2'-O-methyl corresponding base
  modified_base (5)..(5): 2'-hydroxy corresponding base
  modified_base (6)..(6): 2'-O-methyl corresponding base
  modified_base (7)..(7): 2'-hydroxy corresponding base
  modified_base (8)..(8): 2'-O-methyl corresponding base
  modified_base (9)..(9): 2'-hydroxy corresponding base
  modified_base (10)..(10): 2'-O-methyl corresponding base
  modified_base (11)..(11): 2'-hydroxy corresponding base
  modified_base (12)..(12): 2'-O-methyl corresponding base
  modified_base (13)..(13): 2'-hydroxy corresponding base
  modified_base (14)..(14): 2'-O-methyl corresponding base
  modified_base (15)..(15): 2'-hydroxy corresponding base
  modified_base (16)..(16): 2'-O-methyl corresponding base
  modified_base (17)..(17): 2'-hydroxy corresponding base
  modified_base (18)..(18): 2'-O-methyl corresponding base
  modified_base (19)..(19): 2'-hydroxy corresponding base
  modified_base (20)..(20): deoxythymidine
  modified_base (21)..(21): 5'-thio thymidine
ugcugaggccacgaggucatt

SEQ ID NO: 690 - DNA, 21 bp, Artificial Sequence
  Description of Artificial Sequence: Synthetic oligonucleotide
  Description of Combined DNA/RNA Molecule: Synthetic oligonucleotide
  siRNAs to PCSK9
  modified_base (1)..(1): 2'-hydroxy corresponding base
  modified_base (2)..(2): 2'-hydroxy corresponding base
  modified_base (3)..(3): 2'-hydroxy corresponding base
  modified_base (4)..(4): 2'-hydroxy corresponding base
  modified_base (5)..(5): 2'-hydroxy corresponding base
  modified_base (6)..(6): 2'-O-methyl corresponding base
  modified_base (7)..(7): 2'-O-methyl corresponding base
  modified_base (8)..(8): 2'-hydroxy corresponding base
  modified_base (9)..(9): 2'-hydroxy corresponding base
  modified_base (10)..(10): 2'-O-methyl corresponding base
  modified_base (11)..(11): 2'-O-methyl corresponding base
  modified_base (12)..(12): 2'-hydroxy corresponding base
  modified_base (13)..(13): 2'-hydroxy corresponding base
  modified_base (14)..(14): 2'-hydroxy corresponding base
  modified_base (15)..(15): 2'-hydroxy corresponding base
  modified_base (16)..(16): 2'-hydroxy corresponding base
  modified_base (17)..(17): 2'-O-methyl corresponding base
  modified_base (18)..(18): 2'-O-methyl corresponding base
  modified_base (19)..(19): 2'-O-methyl corresponding base
  modified_base (20)..(20): deoxythymidine
  modified_base (21)..(21): 5'-thio thymidine
ugaccucguggccucagcatt

SEQ ID NO: 691 - DNA, 21 bp, Artificial Sequence
  Description of Artificial Sequence: Synthetic oligonucleotide
  Description of Combined DNA/RNA Molecule: Synthetic oligonucleotide
  siRNAs to PCSK9
  modified_base (1)..(1): 2'-deoxy-2'-fluoro corresponding base
  modified_base (2)..(2): 2'-O-methyl corresponding base
  modified_base (3)..(3): 2'-deoxy-2'-fluoro corresponding base
  modified_base (4)..(4): 2'-O-methyl corresponding base
  modified_base (5)..(5): 2'-deoxy-2'-fluoro corresponding base
  modified_base (6)..(6): 2'-O-methyl corresponding base
  modified_base (7)..(7): 2'-deoxy-2'-fluoro corresponding base
  modified_base (8)..(8): 2'-O-methyl corresponding base
  modified_base (9)..(9): 2'-deoxy-2'-fluoro corresponding base
  modified_base (10)..(10): 2'-O-methyl corresponding base
  modified_base (11)..(11): 2'-deoxy-2'-fluoro corresponding base
  modified_base (12)..(12): 2'-O-methyl corresponding base
  modified_base (13)..(13): 2'-deoxy-2'-fluoro corresponding base
  modified_base (14)..(14): 2'-O-methyl corresponding base
  modified_base (15)..(15): 2'-deoxy-2'-fluoro corresponding base
  modified_base (16)..(16): 2'-O-methyl corresponding base
  modified_base (17)..(17): 2'-deoxy-2'-fluoro corresponding base
  modified_base (18)..(18): 2'-O-methyl corresponding base
  modified_base (19)..(19): 2'-deoxy-2'-fluoro corresponding base
  modified_base (20)..(20): deoxythymidine
  modified_base (21)..(21): 5'-thio thymidine
guggucagcggccgggaugtt

SEQ ID NO: 692 - DNA, 21 bp, Artificial Sequence
  Description of Artificial Sequence: Synthetic oligonucleotide
  Description of Combined DNA/RNA Molecule: Synthetic oligonucleotide
  siRNAs to PCSK9
  modified_base (1)..(1): 2'-O-methyl corresponding base
  modified_base (2)..(2): 2'-deoxy-2'-fluoro corresponding base
  modified_base (3)..(3): 2'-O-methyl corresponding base
  modified_base (4)..(4): 2'-deoxy-2'-fluoro corresponding base
  modified_base (5)..(5): 2'-O-methyl corresponding base
  modified_base (6)..(6): 2'-deoxy-2'-fluoro corresponding base
  modified_base (7)..(7): 2'-O-methyl corresponding base
  modified_base (8)..(8): 2'-deoxy-2'-fluoro corresponding base
  modified_base (9)..(9): 2'-O-methyl corresponding base
  modified_base (10)..(10): 2'-deoxy-2'-fluoro corresponding base
  modified_base (11)..(11): 2'-O-methyl corresponding base
  modified_base (12)..(12): 2'-deoxy-2'-fluoro corresponding base
  modified_base (13)..(13): 2'-O-methyl corresponding base
  modified_base (14)..(14): 2'-deoxy-2'-fluoro corresponding base
  modified_base (15)..(15): 2'-O-methyl corresponding base
  modified_base (16)..(16): 2'-deoxy-2'-fluoro corresponding base
  modified_base (17)..(17): 2'-O-methyl corresponding base
  modified_base (18)..(18): 2'-deoxy-2'-fluoro corresponding base
  modified_base (19)..(19): 2'-O-methyl corresponding base
  modified_base (20)..(20): deoxythymidine
  modified_base (21)..(21): 5'-thio thymidine
caucccggccgcugaccactt

SEQ ID NO: 693 - DNA, 21 bp, Artificial Sequence
  Description of Artificial Sequence: Synthetic oligonucleotide
  Description of Combined DNA/RNA Molecule: Synthetic oligonucleotide
  siRNAs to PCSK9
  modified_base (1)..(1): 2'-hydroxy corresponding base
  modified_base (2)..(2): 2'-deoxy-2'-fluoro corresponding base
  modified_base (3)..(3): 2'-hydroxy corresponding base
  modified_base (4)..(4): 2'-hydroxy corresponding base
  modified_base (5)..(5): 2'-deoxy-2'-fluoro corresponding base
  modified_base (6)..(6): 2'-deoxy-2'-fluoro corresponding base
  modified_base (7)..(7): 2'-hydroxy corresponding base
  modified_base (8)..(8): 2'-hydroxy corresponding base
  modified_base (9)..(9): 2'-deoxy-2'-fluoro corresponding base
  modified_base (10)..(10): 2'-hydroxy corresponding base
  modified_base (11)..(11): 2'-hydroxy corresponding base
  modified_base (12)..(12): 2'-deoxy-2'-fluoro corresponding base
  modified_base (13)..(13): 2'-deoxy-2'-fluoro corresponding base
  modified_base (14)..(14): 2'-hydroxy corresponding base
  modified_base (15)..(15): 2'-hydroxy corresponding base
  modified_base (16)..(16): 2'-hydroxy corresponding base
  modified_base (17)..(17): 2'-hydroxy corresponding base
  modified_base (18)..(18): 2'-deoxy-2'-fluoro corresponding base
  modified_base (19)..(19): 2'-hydroxy corresponding base
  modified_base (20)..(20): deoxythymidine
  modified_base (21)..(21): 5'-thio thymidine
guggucagcggccgggaugtt

SEQ ID NO: 694 - DNA, 21 bp, Artificial Sequence
  Description of Artificial Sequence: Synthetic oligonucleotide
  Description of Combined DNA/RNA Molecule: Synthetic oligonucleotide
  siRNAs to PCSK9
  modified_base (1)..(1): 2'-deoxy-2'-fluoro corresponding base
  modified_base (2)..(2): 2'-hydroxy corresponding base
  modified_base (3)..(3): 2'-deoxy-2'-fluoro corresponding base
  modified_base (4)..(4): 2'-deoxy-2'-fluoro corresponding base
  modified_base (5)..(5): 2'-deoxy-2'-fluoro corresponding base
  modified_base (6)..(6): 2'-deoxy-2'-fluoro corresponding base
  modified_base (7)..(7): 2'-hydroxy corresponding base
  modified_base (8)..(8): 2'-hydroxy corresponding base
  modified_base (9)..(9): 2'-deoxy-2'-fluoro corresponding base
  modified_base (10)..(10): 2'-deoxy-2'-fluoro corresponding base
  modified_base (11)..(11): 2'-hydroxy corresponding base
  modified_base (12)..(12): 2'-deoxy-2'-fluoro corresponding base
  modified_base (13)..(13): 2'-deoxy-2'-fluoro corresponding base
  modified_base (14)..(14): 2'-hydroxy corresponding base
  modified_base (15)..(15): 2'-hydroxy corresponding base
  modified_base (16)..(16): 2'-deoxy-2'-fluoro corresponding base
  modified_base (17)..(17): 2'-deoxy-2'-fluoro corresponding base
  modified_base (18)..(18): 2'-hydroxy corresponding base
  modified_base (19)..(19): 2'-deoxy-2'-fluoro corresponding base
  modified_base (20)..(20): deoxythymidine
  modified_base (21)..(21): 5'-thio thymidine
caucccggccgcugaccactt

SEQ ID NO: 695 - DNA, 21 bp, Artificial Sequence
  Description of Artificial Sequence: Synthetic oligonucleotide
  Description of Combined DNA/RNA Molecule: Synthetic oligonucleotide
  siRNAs to PCSK9
  modified_base (1)..(1): 2'-hydroxy corresponding base
  modified_base (2)..(2): 2'-O-methyl corresponding base
  modified_base (3)..(3): 2'-hydroxy corresponding base
  modified_base (4)..(4): 2'-O-methyl corresponding base
  modified_base (5)..(5): 2'-hydroxy corresponding base
  modified_base (6)..(6): 2'-O-methyl corresponding base
  modified_base (7)..(7): 2'-hydroxy corresponding base
  modified_base (8)..(8): 2'-O-methyl corresponding base
  modified_base (9)..(9): 2'-hydroxy corresponding base
  modified_base (10)..(10): 2'-O-methyl corresponding base
  modified_base (11)..(11): 2'-hydroxy corresponding base
  modified_base (12)..(12): 2'-O-methyl corresponding base
  modified_base (13)..(13): 2'-hydroxy corresponding base
  modified_base (14)..(14): 2'-O-methyl corresponding base
  modified_base (15)..(15): 2'-hydroxy corresponding base
  modified_base (16)..(16): 2'-O-methyl corresponding base
  modified_base (17)..(17): 2'-hydroxy corresponding base
  modified_base (18)..(18): 2'-O-methyl corresponding base
  modified_base (19)..(19): 2'-hydroxy corresponding base
  modified_base (20)..(20): deoxythymidine
  modified_base (21)..(21): 5'-thio thymidine
guggucagcggccgggaugtt

SEQ ID NO: 696 - DNA, 21 bp, Artificial Sequence
  Description of Artificial Sequence: Synthetic oligonucleotide
  Description of Combined DNA/RNA Molecule: Synthetic oligonucleotide
  siRNAs to PCSK9
  modified_base (1)..(1): 2'-O-methyl corresponding base
  modified_base (2)..(2): 2'-deoxy-2'-fluoro corresponding base
  modified_base (3)..(3): 2'-O-methyl corresponding base
  modified_base (4)..(4): 2'-deoxy-2'-fluoro corresponding base
  modified_base (5)..(5): 2'-O-methyl corresponding base
  modified_base (6)..(6): 2'-deoxy-2'-fluoro corresponding base
  modified_base (7)..(7): 2'-O-methyl corresponding base
  modified_base (8)..(8): 2'-deoxy-2'-fluoro corresponding base
  modified_base (9)..(9): 2'-O-methyl corresponding base
  modified_base (10)..(10): 2'-deoxy-2'-fluoro corresponding base
  modified_base (11)..(11): 2'-O-methyl corresponding base
  modified_base (12)..(12): 2'-deoxy-2'-fluoro corresponding base
  modified_base (13)..(13): 2'-O-methyl corresponding base
  modified_base (14)..(14): 2'-deoxy-2'-fluoro corresponding base
  modified_base (15)..(15): 2'-O-methyl corresponding base
  modified_base (16)..(16): 2'-deoxy-2'-fluoro corresponding base
  modified_base (17)..(17): 2'-O-methyl corresponding base
  modified_base (18)..(18): 2'-deoxy-2'-fluoro corresponding base
  modified_base (19)..(19): 2'-O-methyl corresponding base
  modified_base (20)..(20): deoxythymidine
  modified_base (21)..(21): 5'-thio thymidine
caucccggccgcugaccactt

SEQ ID NO: 697 - DNA, 21 bp, Artificial Sequence
  Description of Artificial Sequence: Synthetic oligonucleotide
  Description of Combined DNA/RNA Molecule: Synthetic oligonucleotide
  siRNAs to PCSK9
  modified_base (1)..(1): 2'-hydroxy corresponding base
  modified_base (2)..(2): 2'-O-methyl corresponding base
  modified_base (3)..(3): 2'-hydroxy corresponding base
  modified_base (4)..(4): 2'-O-methyl corresponding base
  modified_base (5)..(5): 2'-hydroxy corresponding base
  modified_base (6)..(6): 2'-O-methyl corresponding base
  modified_base (7)..(7): 2'-hydroxy corresponding base
  modified_base (8)..(8): 2'-O-methyl corresponding base
  modified_base (9)..(9): 2'-hydroxy corresponding base
  modified_base (10)..(10): 2'-O-methyl corresponding base
  modified_base (11)..(11): 2'-hydroxy corresponding base
  modified_base (12)..(12): 2'-O-methyl corresponding base
  modified_base (13)..(13): 2'-hydroxy corresponding base
  modified_base (14)..(14): 2'-O-methyl corresponding base
  modified_base (15)..(15): 2'-hydroxy corresponding base
  modified_base (16)..(16): 2'-O-methyl corresponding base
  modified_base (17)..(17): 2'-hydroxy corresponding base
  modified_base (18)..(18): 2'-O-methyl corresponding base
  modified_base (19)..(19): 2'-hydroxy corresponding base
  modified_base (20)..(20): deoxythymidine
  modified_base (21)..(21): 5'-thio thymidine
guggucagcggccgggaugtt

SEQ ID NO: 698 - DNA, 21 bp, Artificial Sequence
  Description of Artificial Sequence: Synthetic oligonucleotide
  Description of Combined DNA/RNA Molecule: Synthetic oligonucleotide
  siRNAs to PCSK9
  modified_base (1)..(1): 2'-deoxy-2'-fluoro corresponding base
  modified_base (2)..(2): 2'-hydroxy corresponding base
  modified_base (3)..(3): 2'-deoxy-2'-fluoro corresponding base
  modified_base (4)..(4): 2'-deoxy-2'-fluoro corresponding base
  modified_base (5)..(5): 2'-deoxy-2'-fluoro corresponding base
  modified_base (6)..(6): 2'-deoxy-2'-fluoro corresponding base
  modified_base (7)..(7): 2'-hydroxy corresponding base
  modified_base (8)..(8): 2'-hydroxy corresponding base
  modified_base (9)..(9): 2'-deoxy-2'-fluoro corresponding base
  modified_base (10)..(10): 2'-deoxy-2'-fluoro corresponding base
  modified_base (11)..(11): 2'-hydroxy corresponding base
  modified_base (12)..(12): 2'-deoxy-2'-fluoro corresponding base
  modified_base (13)..(13): 2'-deoxy-2'-fluoro corresponding base
  modified_base (14)..(14): 2'-hydroxy corresponding base
  modified_base (15)..(15): 2'-hydroxy corresponding base
  modified_base (16)..(16): 2'-deoxy-2'-fluoro corresponding base
  modified_base (17)..(17): 2'-deoxy-2'-fluoro corresponding base
  modified_base (18)..(18): 2'-hydroxy corresponding base
  modified_base (19)..(19): 2'-deoxy-2'-fluoro corresponding base
  modified_base (20)..(20): deoxythymidine
  modified_base (21)..(21): 5'-thio thymidine
caucccggccgcugaccactt

SEQ ID NO: 699 - DNA, 21 bp, Artificial Sequence
  Description of Artificial Sequence: Synthetic oligonucleotide
  Description of Combined DNA/RNA Molecule: Synthetic oligonucleotide
  siRNAs to PCSK9
  modified_base (1)..(1): 2'-deoxy-2'-fluoro corresponding base
  modified_base (2)..(2): 2'-O-methyl corresponding base
  modified_base (3)..(3): 2'-deoxy-2'-fluoro corresponding base
  modified_base (4)..(4): 2'-O-methyl corresponding base
  modified_base (5)..(5): 2'-deoxy-2'-fluoro corresponding base
  modified_base (6)..(6): 2'-O-methyl corresponding base
  modified_base (7)..(7): 2'-deoxy-2'-fluoro corresponding base
  modified_base (8)..(8): 2'-O-methyl corresponding base
  modified_base (9)..(9): 2'-deoxy-2'-fluoro corresponding base
  modified_base (10)..(10): 2'-O-methyl corresponding base
  modified_base (11)..(11): 2'-deoxy-2'-fluoro corresponding base
  modified_base (12)..(12): 2'-O-methyl corresponding base
  modified_base (13)..(13): 2'-deoxy-2'-fluoro corresponding base
  modified_base (14)..(14): 2'-O-methyl corresponding base
  modified_base (15)..(15): 2'-deoxy-2'-fluoro corresponding base
  modified_base (16)..(16): 2'-O-methyl corresponding base
  modified_base (17)..(17): 2'-deoxy-2'-fluoro corresponding base
  modified_base (18)..(18): 2'-O-methyl corresponding base
  modified_base (19)..(19): 2'-deoxy-2'-fluoro corresponding base
  modified_base (20)..(20): deoxythymidine
  modified_base (21)..(21): 5'-thio thymidine
guggucagcggccgggaugtt

SEQ ID NO: 700 - DNA, 21 bp, Artificial Sequence
  Description of Artificial Sequence: Synthetic oligonucleotide
  Description of Combined DNA/RNA Molecule: Synthetic oligonucleotide
  siRNAs to PCSK9
  modified_base (1)..(1): 2'-hydroxy corresponding base
  modified_base (2)..(2): 2'-hydroxy corresponding base
  modified_base (3)..(3): 2'-hydroxy corresponding base
  modified_base (4)..(4): 2'-hydroxy corresponding base
  modified_base (5)..(5): 2'-hydroxy corresponding base
  modified_base (6)..(6): 2'-O-methyl corresponding base
  modified_base (7)..(7): 2'-O-methyl corresponding base
  modified_base (8)..(8): 2'-hydroxy corresponding base
  modified_base (9)..(9): 2'-hydroxy corresponding base
  modified_base (10)..(10): 2'-O-methyl corresponding base
  modified_base (11)..(11): 2'-O-methyl corresponding base
  modified_base (12)..(12): 2'-hydroxy corresponding base
  modified_base (13)..(13): 2'-hydroxy corresponding base
  modified_base (14)..(14): 2'-hydroxy corresponding base
  modified_base (15)..(15): 2'-hydroxy corresponding base
  modified_base (16)..(16): 2'-hydroxy corresponding base
  modified_base (17)..(17): 2'-O-methyl corresponding base
  modified_base (18)..(18): 2'-O-methyl corresponding base
  modified_base (19)..(19): 2'-O-methyl corresponding base
  modified_base (20)..(20): deoxythymidine
  modified_base (21)..(21): 5'-thio thymidine
caucccggccgcugaccactt

SEQ ID NO: 701 - DNA, 21 bp, Artificial Sequence
  Description of Artificial Sequence: Synthetic oligonucleotide
  Description of Combined DNA/RNA Molecule: Synthetic oligonucleotide
  siRNAs to PCSK9
  modified_base (1)..(1): 2'-hydroxy corresponding base
  modified_base (2)..(2): 2'-deoxy-2'-fluoro corresponding base
  modified_base (3)..(3): 2'-hydroxy corresponding base
  modified_base (4)..(4): 2'-hydroxy corresponding base
  modified_base (5)..(5): 2'-deoxy-2'-fluoro corresponding base
  modified_base (6)..(6): 2'-deoxy-2'-fluoro corresponding base
  modified_base (7)..(7): 2'-hydroxy corresponding base
  modified_base (8)..(8): 2'-hydroxy corresponding base
  modified_base (9)..(9): 2'-deoxy-2'-fluoro corresponding base
  modified_base (10)..(10): 2'-hydroxy corresponding base
  modified_base (11)..(11): 2'-hydroxy corresponding base
  modified_base (12)..(12): 2'-deoxy-2'-fluoro corresponding base
  modified_base (13)..(13): 2'-deoxy-2'-fluoro corresponding base
  modified_base (14)..(14): 2'-hydroxy corresponding base
  modified_base (15)..(15): 2'-hydroxy corresponding base
  modified_base (16)..(16): 2'-hydroxy corresponding base
  modified_base (17)..(17): 2'-hydroxy corresponding base
  modified_base (18)..(18): 2'-deoxy-2'-fluoro corresponding base
  modified_base (19)..(19): 2'-hydroxy corresponding base
  modified_base (20)..(20): deoxythymidine
  modified_base (21)..(21): 5'-thio thymidine
guggucagcggccgggaugtt

SEQ ID NO: 702 - DNA, 21 bp, Artificial Sequence
  Description of Artificial Sequence: Synthetic oligonucleotide
  Description of Combined DNA/RNA Molecule: Synthetic oligonucleotide
  siRNAs to PCSK9
  modified_base (1)..(1): 2'-hydroxy corresponding base
  modified_base (2)..(2): 2'-hydroxy corresponding base
  modified_base (3)..(3): 2'-hydroxy corresponding base
  modified_base (4)..(4): 2'-hydroxy corresponding base
  modified_base (5)..(5): 2'-hydroxy corresponding base
  modified_base (6)..(6): 2'-O-methyl corresponding base
  modified_base (7)..(7): 2'-O-methyl corresponding base
  modified_base (8)..(8): 2'-hydroxy corresponding base
  modified_base (9)..(9): 2'-hydroxy corresponding base
  modified_base (10)..(10): 2'-O-methyl corresponding base
  modified_base (11)..(11): 2'-O-methyl corresponding base
  modified_base (12)..(12): 2'-hydroxy corresponding base
  modified_base (13)..(13): 2'-hydroxy corresponding base
  modified_base (14)..(14): 2'-hydroxy corresponding base
  modified_base (15)..(15): 2'-hydroxy corresponding base
  modified_base (16)..(16): 2'-hydroxy corresponding base
  modified_base (17)..(17): 2'-O-methyl corresponding base
  modified_base (18)..(18): 2'-O-methyl corresponding base
  modified_base (19)..(19): 2'-O-methyl corresponding base
  modified_base (20)..(20): deoxythymidine
  modified_base (21)..(21): 5'-thio thymidine
caucccggccgcugaccactt

SEQ ID NO: 703 - DNA, 21 bp, Artificial Sequence
  Description of Artificial Sequence: Synthetic oligonucleotide
  Description of Combined DNA/RNA Molecule: Synthetic oligonucleotide
  siRNAs to PCSK9
  modified_base (1)..(1): 2'-hydroxy corresponding base
  modified_base (2)..(2): 2'-O-methyl corresponding base
  modified_base (3)..(3): 2'-hydroxy corresponding base
  modified_base (4)..(4): 2'-O-methyl corresponding base
  modified_base (5)..(5): 2'-hydroxy corresponding base
  modified_base (6)..(6): 2'-O-methyl corresponding base
  modified_base (7)..(7): 2'-hydroxy corresponding base
  modified_base (8)..(8): 2'-O-methyl corresponding base
  modified_base (9)..(9): 2'-hydroxy corresponding base
  modified_base (10)..(10): 2'-O-methyl corresponding base
  modified_base (11)..(11): 2'-hydroxy corresponding base
  modified_base (12)..(12): 2'-O-methyl corresponding base
  modified_base (13)..(13): 2'-hydroxy corresponding base
  modified_base (14)..(14): 2'-O-methyl corresponding base
  modified_base (15)..(15): 2'-hydroxy corresponding base
  modified_base (16)..(16): 2'-O-methyl corresponding base
  modified_base (17)..(17): 2'-hydroxy corresponding base
  modified_base (18)..(18): 2'-O-methyl corresponding base
  modified_base (19)..(19): 2'-hydroxy corresponding base
  modified_base (20)..(20): deoxythymidine
  modified_base (21)..(21): 5'-thio thymidine
guggucagcggccgggaugtt

SEQ ID NO: 704 - DNA, 21 bp, Artificial Sequence
  Description of Artificial Sequence: Synthetic oligonucleotide
  Description of Combined DNA/RNA Molecule: Synthetic oligonucleotide
  siRNAs to PCSK9
  modified_base (1)..(1): 2'-hydroxy corresponding base
  modified_base (2)..(2): 2'-hydroxy corresponding base
  modified_base (3)..(3): 2'-hydroxy corresponding base
  modified_base (4)..(4): 2'-hydroxy corresponding base
  modified_base (5)..(5): 2'-hydroxy corresponding base
  modified_base (6)..(6): 2'-O-methyl corresponding base
  modified_base (7)..(7): 2'-O-methyl corresponding base
  modified_base (8)..(8): 2'-hydroxy corresponding base
  modified_base (9)..(9): 2'-hydroxy corresponding base
  modified_base (10)..(10): 2'-O-methyl corresponding base
  modified_base (11)..(11): 2'-O-methyl corresponding base
  modified_base (12)..(12): 2'-hydroxy corresponding base
  modified_base (13)..(13): 2'-hydroxy corresponding base
  modified_base (14)..(14): 2'-hydroxy corresponding base
  modified_base (15)..(15): 2'-hydroxy corresponding base
  modified_base (16)..(16): 2'-hydroxy corresponding base
  modified_base (17)..(17): 2'-O-methyl corresponding base
  modified_base (18)..(18): 2'-O-methyl corresponding base
  modified_base (19)..(19): 2'-O-methyl corresponding base
  modified_base (20)..(20): deoxythymidine
  modified_base (21)..(21): 5'-thio thymidine
caucccggccgcugaccactt

SEQ ID NO: 705 - DNA, 21 bp, Artificial Sequence
  Description of Artificial Sequence: Synthetic oligonucleotide
  Description of Combined DNA/RNA Molecule: Synthetic oligonucleotide
  siRNAs to PCSK9
  modified_base (1)..(1): 2'-hydroxy corresponding base
  modified_base (2)..(2): 2'-hydroxy corresponding base
  modified_base (3)..(3): 2'-hydroxy corresponding base
  modified_base (4)..(4): 2'-hydroxy corresponding base
  modified_base (5)..(5): 2'-hydroxy corresponding base
  modified_base (6)..(6): 2'-hydroxy corresponding base
  modified_base (7)..(7): 2'-hydroxy corresponding base
  modified_base (8)..(8): 2'-hydroxy corresponding base
  modified_base (9)..(9): 2'-hydroxy corresponding base
  modified_base (10)..(10): 2'-hydroxy corresponding base
  modified_base (11)..(11): 2'-hydroxy corresponding base
  modified_base (12)..(12): 2'-hydroxy corresponding base
  modified_base (13)..(13): 2'-hydroxy corresponding base
  modified_base (14)..(14): 2'-hydroxy corresponding base
  modified_base (15)..(15): 2'-hydroxy corresponding base
  modified_base (16)..(16): 2'-hydroxy corresponding base
  modified_base (17)..(17): 2'-hydroxy corresponding base
  modified_base (18)..(18): 2'-hydroxy corresponding base
  modified_base (19)..(19): 2'-hydroxy corresponding base
  modified_base (20)..(20): deoxythymidine
  modified_base (21)..(21): deoxythymidine
ggccacgaggucagcccaatt

SEQ ID NO: 706 - DNA, 21 bp, Artificial Sequence
  Description of Artificial Sequence: Synthetic oligonucleotide
  Description of Combined DNA/RNA Molecule: Synthetic oligonucleotide
  siRNAs to PCSK9
  modified_base (1)..(1): 2'-hydroxy corresponding base
  modified_base (2)..(2): 2'-hydroxy corresponding base
  modified_base (3)..(3): 2'-hydroxy corresponding base
  modified_base (4)..(4): 2'-hydroxy corresponding base
  modified_base (5)..(5): 2'-hydroxy corresponding base
  modified_base (6)..(6): 2'-hydroxy corresponding base
  modified_base (7)..(7): 2'-hydroxy corresponding base
  modified_base (8)..(8): 2'-hydroxy corresponding base
  modified_base (9)..(9): 2'-hydroxy corresponding base
  modified_base (10)..(10): 2'-hydroxy corresponding base
  modified_base (11)..(11): 2'-hydroxy corresponding base
  modified_base (12)..(12): 2'-hydroxy corresponding base
  modified_base (13)..(13): 2'-hydroxy corresponding base
  modified_base (14)..(14): 2'-hydroxy corresponding base
  modified_base (15)..(15): 2'-hydroxy corresponding base
  modified_base (16)..(16): 2'-hydroxy corresponding base
  modified_base (17)..(17): 2'-hydroxy corresponding base
  modified_base (18)..(18): 2'-hydroxy corresponding base
  modified_base (19)..(19): 2'-hydroxy corresponding base
  modified_base (20)..(20): deoxythymidine
  modified_base (21)..(21): deoxythymidine
uugggcugaccucguggcctt

SEQ ID NO: 707 - DNA, 21 bp, Artificial Sequence
  Description of Artificial Sequence: Synthetic oligonucleotide
  Description of Combined DNA/RNA Molecule: Synthetic oligonucleotide
  siRNAs to PCSK9
  modified_base (1)..(1): 2'-hydroxy corresponding base
  modified_base (2)..(2): 2'-hydroxy corresponding base
  modified_base (3)..(3): 2'-hydroxy corresponding base
  modified_base (4)..(4): 2'-hydroxy corresponding base
  modified_base (5)..(5): 2'-hydroxy corresponding base
  modified_base (6)..(6): 2'-hydroxy corresponding base
  modified_base (7)..(7): 2'-hydroxy corresponding base
  modified_base (8)..(8): 2'-hydroxy corresponding base
  modified_base (9)..(9): 2'-hydroxy corresponding base
  modified_base (10)..(10): 2'-hydroxy corresponding base
  modified_base (11)..(11): 2'-hydroxy corresponding base
  modified_base (12)..(12): 2'-hydroxy corresponding base
  modified_base (13)..(13): 2'-hydroxy corresponding base
  modified_base (14)..(14): 2'-hydroxy corresponding base
  modified_base (15)..(15): 2'-hydroxy corresponding base
  modified_base (16)..(16): 2'-hydroxy corresponding base
  modified_base (17)..(17): 2'-hydroxy corresponding base
  modified_base (18)..(18): 2'-hydroxy corresponding base
  modified_base (19)..(19): 2'-hydroxy corresponding base
  modified_base (20)..(20): deoxythymidine
  modified_base (21)..(21): deoxythymidine
cgaggucagcccaaccagutt

SEQ ID NO: 708 - DNA, 21 bp, Artificial Sequence
  Description of Artificial Sequence: Synthetic oligonucleotide
  Description of Combined DNA/RNA Molecule: Synthetic oligonucleotide
  siRNAs to PCSK9
  modified_base (1)..(1): 2'-hydroxy corresponding base
  modified_base (2)..(2): 2'-hydroxy corresponding base
  modified_base (3)..(3): 2'-hydroxy corresponding base
  modified_base (4)..(4): 2'-hydroxy corresponding base
  modified_base (5)..(5): 2'-hydroxy corresponding base
  modified_base (6)..(6): 2'-hydroxy corresponding base
  modified_base (7)..(7): 2'-hydroxy corresponding base
  modified_base (8)..(8): 2'-hydroxy corresponding base
  modified_base (9)..(9): 2'-hydroxy corresponding base
  modified_base (10)..(10): 2'-hydroxy corresponding base
  modified_base (11)..(11): 2'-hydroxy corresponding base
  modified_base (12)..(12): 2'-hydroxy corresponding base
  modified_base (13)..(13): 2'-hydroxy corresponding base
  modified_base (14)..(14): 2'-hydroxy corresponding base
  modified_base (15)..(15): 2'-hydroxy corresponding base
  modified_base (16)..(16): 2'-hydroxy corresponding base
  modified_base (17)..(17): 2'-hydroxy corresponding base
  modified_base (18)..(18): 2'-hydroxy corresponding base
  modified_base (19)..(19): 2'-hydroxy corresponding base
  modified_base (20)..(20): deoxythymidine
  modified_base (21)..(21): deoxythymidine
acugguugggcugaccucgtt

SEQ ID NO: 709 - DNA, 21 bp, Artificial Sequence
  Description of Artificial Sequence: Synthetic oligonucleotide
  Description of Combined DNA/RNA Molecule: Synthetic oligonucleotide
  siRNAs to PCSK9
  modified_base (1)..(1): 2'-hydroxy corresponding base
  modified_base (2)..(2): 2'-hydroxy corresponding base
  modified_base (3)..(3): 2'-hydroxy corresponding base
  modified_base (4)..(4): 2'-hydroxy corresponding base
  modified_base (5)..(5): 2'-hydroxy corresponding base
  modified_base (6)..(6): 2'-hydroxy corresponding base
  modified_base (7)..(7): 2'-hydroxy corresponding base
  modified_base (8)..(8): 2'-hydroxy corresponding base
  modified_base (9)..(9): 2'-hydroxy corresponding base
  modified_base (10)..(10): 2'-hydroxy corresponding base
  modified_base (11)..(11): 2'-hydroxy corresponding base
  modified_base (12)..(12): 2'-hydroxy corresponding base
  modified_base (13)..(13): 2'-hydroxy corresponding base
  modified_base (14)..(14): 2'-hydroxy corresponding base
  modified_base (15)..(15): 2'-hydroxy corresponding base
  modified_base (16)..(16): 2'-hydroxy corresponding base
  modified_base (17)..(17): 2'-hydroxy corresponding base
  modified_base (18)..(18): 2'-hydroxy corresponding base
  modified_base (19)..(19): 2'-hydroxy corresponding base
  modified_base (20)..(20): deoxythymidine
  modified_base (21)..(21): deoxythymidine
gucagcccaaccagugcgutt

SEQ ID NO: 710 - DNA, 21 bp, Artificial Sequence
  Description of Artificial Sequence: Synthetic oligonucleotide
  Description of Combined DNA/RNA Molecule: Synthetic oligonucleotide
  siRNAs to PCSK9
  modified_base (1)..(1): 2'-hydroxy corresponding base
  modified_base (2)..(2): 2'-hydroxy corresponding base
  modified_base (3)..(3): 2'-hydroxy corresponding base
  modified_base (4)..(4): 2'-hydroxy corresponding base
  modified_base (5)..(5): 2'-hydroxy corresponding base
  modified_base (6)..(6): 2'-hydroxy corresponding base
  modified_base (7)..(7): 2'-hydroxy corresponding base
  modified_base (8)..(8): 2'-hydroxy corresponding base
  modified_base (9)..(9): 2'-hydroxy corresponding base
  modified_base (10)..(10): 2'-hydroxy corresponding base
  modified_base (11)..(11): 2'-hydroxy corresponding base
  modified_base (12)..(12): 2'-hydroxy corresponding base
  modified_base (13)..(13): 2'-hydroxy corresponding base
  modified_base (14)..(14): 2'-hydroxy corresponding base
  modified_base (15)..(15): 2'-hydroxy corresponding base
  modified_base (16)..(16): 2'-hydroxy corresponding base
  modified_base (17)..(17): 2'-hydroxy corresponding base
  modified_base (18)..(18): 2'-hydroxy corresponding base
  modified_base (19)..(19): 2'-hydroxy corresponding base
  modified_base (20)..(20): deoxythymidine
  modified_base (21)..(21): deoxythymidine
acgcacugguugggcugactt

SEQ ID NO: 711 - DNA, 21 bp, Artificial Sequence
  Description of Artificial Sequence: Synthetic oligonucleotide
  Description of Combined DNA/RNA Molecule: Synthetic oligonucleotide
  siRNAs to PCSK9
  modified_base (1)..(1): 2'-hydroxy corresponding base
  modified_base (2)..(2): 2'-hydroxy corresponding base
  modified_base (3)..(3): 2'-hydroxy corresponding base
  modified_base (4)..(4): 2'-hydroxy corresponding base
  modified_base (5)..(5): 2'-hydroxy corresponding base
  modified_base (6)..(6): 2'-hydroxy corresponding base
  modified_base (7)..(7): 2'-hydroxy corresponding base
  modified_base (8)..(8): 2'-hydroxy corresponding base
  modified_base (9)..(9): 2'-hydroxy corresponding base
  modified_base (10)..(10): 2'-hydroxy corresponding base
  modified_base (11)..(11): 2'-hydroxy corresponding base
  modified_base (12)..(12): 2'-hydroxy corresponding base
  modified_base (13)..(13): 2'-hydroxy corresponding base
  modified_base (14)..(14): 2'-hydroxy corresponding base
  modified_base (15)..(15): 2'-hydroxy corresponding base
  modified_base (16)..(16): 2'-hydroxy corresponding base
  modified_base (17)..(17): 2'-hydroxy corresponding base
  modified_base (18)..(18): 2'-hydroxy corresponding base
  modified_base (19)..(19): 2'-hydroxy corresponding base
  modified_base (20)..(20): deoxythymidine
  modified_base (21)..(21): deoxythymidine
cagcccaaccagugcguggtt

SEQ ID NO: 712 - DNA, 21 bp, Artificial Sequence
  Description of Artificial Sequence: Synthetic oligonucleotide
  Description of Combined DNA/RNA Molecule: Synthetic oligonucleotide
  siRNAs to PCSK9
  modified_base (1)..(1): 2'-hydroxy corresponding base
  modified_base (2)..(2): 2'-hydroxy corresponding base
  modified_base (3)..(3): 2'-hydroxy corresponding base
  modified_base (4)..(4): 2'-hydroxy corresponding base
  modified_base (5)..(5): 2'-hydroxy corresponding base
  modified_base (6)..(6): 2'-hydroxy corresponding base
  modified_base (7)..(7): 2'-hydroxy corresponding base
  modified_base (8)..(8): 2'-hydroxy corresponding base
  modified_base (9)..(9): 2'-hydroxy corresponding base
  modified_base (10)..(10): 2'-hydroxy corresponding base
  modified_base (11)..(11): 2'-hydroxy corresponding base
  modified_base (12)..(12): 2'-hydroxy corresponding base
  modified_base (13)..(13): 2'-hydroxy corresponding base
  modified_base (14)..(14): 2'-hydroxy corresponding base
  modified_base (15)..(15): 2'-hydroxy corresponding base
  modified_base (16)..(16): 2'-hydroxy corresponding base
  modified_base (17)..(17): 2'-hydroxy corresponding base
  modified_base (18)..(18): 2'-hydroxy corresponding base
  modified_base (19)..(19): 2'-hydroxy corresponding base
  modified_base (20)..(20): deoxythymidine
  modified_base (21)..(21): deoxythymidine
ccacgcacugguugggcugtt

SEQ ID NO: 713 - DNA, 21 bp, Artificial Sequence
  Description of Artificial Sequence: Synthetic oligonucleotide
  Description of Combined DNA/RNA Molecule: Synthetic oligonucleotide
  siRNAs to PCSK9
  modified_base (1)..(1): 2'-hydroxy corresponding base
  modified_base (2)..(2): 2'-hydroxy corresponding base
  modified_base (3)..(3): 2'-hydroxy corresponding base
  modified_base (4)..(4): 2'-hydroxy corresponding base
  modified_base (5)..(5): 2'-hydroxy corresponding base
  modified_base (6)..(6): 2'-hydroxy corresponding base
  modified_base (7)..(7): 2'-hydroxy corresponding base
  modified_base (8)..(8): 2'-hydroxy corresponding base
  modified_base (9)..(9): 2'-hydroxy corresponding base
  modified_base (10)..(10): 2'-hydroxy corresponding base
  modified_base (11)..(11): 2'-hydroxy corresponding base
  modified_base (12)..(12): 2'-hydroxy corresponding base
  modified_base (13)..(13): 2'-hydroxy corresponding base
  modified_base (14)..(14): 2'-hydroxy corresponding base
  modified_base (15)..(15): 2'-hydroxy corresponding base
  modified_base (16)..(16): 2'-hydroxy corresponding base
  modified_base (17)..(17): 2'-hydroxy corresponding base
  modified_base (18)..(18): 2'-hydroxy corresponding base
  modified_base (19)..(19): 2'-hydroxy corresponding base
  modified_base (20)..(20): deoxythymidine
  modified_base (21)..(21): deoxythymidine
cacagggaggccagcaucctt

SEQ ID NO: 714 - DNA, 21 bp, Artificial Sequence
  Description of Artificial Sequence: Synthetic oligonucleotide
  Description of Combined DNA/RNA Molecule: Synthetic oligonucleotide
  siRNAs to PCSK9
  modified_base (1)..(1): 2'-hydroxy corresponding base
  modified_base (2)..(2): 2'-hydroxy corresponding base
  modified_base (3)..(3): 2'-hydroxy corresponding base
  modified_base (4)..(4): 2'-hydroxy corresponding base
  modified_base (5)..(5): 2'-hydroxy corresponding base
  modified_base (6)..(6): 2'-hydroxy corresponding base
  modified_base (7)..(7): 2'-hydroxy corresponding base
  modified_base (8)..(8): 2'-hydroxy corresponding base
  modified_base (9)..(9): 2'-hydroxy corresponding base
  modified_base (10)..(10): 2'-hydroxy corresponding base
  modified_base (11)..(11): 2'-hydroxy corresponding base
  modified_base (12)..(12): 2'-hydroxy corresponding base
  modified_base (13)..(13): 2'-hydroxy corresponding base
  modified_base (14)..(14): 2'-hydroxy corresponding base
  modified_base (15)..(15): 2'-hydroxy corresponding base
  modified_base (16)..(16): 2'-hydroxy corresponding base
  modified_base (17)..(17): 2'-hydroxy corresponding base
  modified_base (18)..(18): 2'-hydroxy corresponding base
  modified_base (19)..(19): 2'-hydroxy corresponding base
  modified_base (20)..(20): deoxythymidine
  modified_base (21)..(21): deoxythymidine
ggaugcuggccucccugugtt

SEQ ID NO: 715 - DNA, 21 bp, Artificial Sequence
  Description of Artificial Sequence: Synthetic oligonucleotide
  Description of Combined DNA/RNA Molecule: Synthetic oligonucleotide
  siRNAs to PCSK9
  modified_base (1)..(1): 2'-hydroxy corresponding base
  modified_base (2)..(2): 2'-hydroxy corresponding base
  modified_base (3)..(3): 2'-hydroxy corresponding base
  modified_base (4)..(4): 2'-hydroxy corresponding base
  modified_base (5)..(5): 2'-hydroxy corresponding base
  modified_base (6)..(6): 2'-hydroxy corresponding base
  modified_base (7)..(7): 2'-hydroxy corresponding base
  modified_base (8)..(8): 2'-hydroxy corresponding base
  modified_base (9)..(9): 2'-hydroxy corresponding base
  modified_base (10)..(10): 2'-hydroxy corresponding base
  modified_base (11)..(11): 2'-hydroxy corresponding base
  modified_base (12)..(12): 2'-hydroxy corresponding base
  modified_base (13)..(13): 2'-hydroxy corresponding base
  modified_base (14)..(14): 2'-hydroxy corresponding base
  modified_base (15)..(15): 2'-hydroxy corresponding base
  modified_base (16)..(16): 2'-hydroxy corresponding base
  modified_base (17)..(17): 2'-hydroxy corresponding base
  modified_base (18)..(18): 2'-hydroxy corresponding base
  modified_base (19)..(19): 2'-hydroxy corresponding base
  modified_base (20)..(20): deoxythymidine
  modified_base (21)..(21): 5'-thio thymidine
ccagcauccacgcuuccugtt

SEQ ID NO: 716 - DNA, 21 bp, Artificial Sequence
  Description of Artificial Sequence: Synthetic oligonucleotide
  Description of Combined DNA/RNA Molecule: Synthetic oligonucleotide
  siRNAs to PCSK9
  modified_base (1)..(1): 2'-hydroxy corresponding base
  modified_base (2)..(2): 2'-hydroxy corresponding base
  modified_base (3)..(3): 2'-hydroxy corresponding base
  modified_base (4)..(4): 2'-hydroxy corresponding base
  modified_base (5)..(5): 2'-hydroxy corresponding base
  modified_base (6)..(6): 2'-hydroxy corresponding base
  modified_base (7)..(7): 2'-hydroxy corresponding base
  modified_base (8)..(8): 2'-hydroxy corresponding base
  modified_base (9)..(9): 2'-hydroxy corresponding base
  modified_base (10)..(10): 2'-hydroxy corresponding base
  modified_base (11)..(11): 2'-hydroxy corresponding base
  modified_base (12)..(12): 2'-hydroxy corresponding base
  modified_base (13)..(13): 2'-hydroxy corresponding base
  modified_base (14)..(14): 2'-hydroxy corresponding base
  modified_base (15)..(15): 2'-hydroxy corresponding base
  modified_base (16)..(16): 2'-hydroxy corresponding base
  modified_base (17)..(17): 2'-hydroxy corresponding base
  modified_base (18)..(18): 2'-hydroxy corresponding base
  modified_base (19)..(19): 2'-hydroxy corresponding base
  modified_base (20)..(20): deoxythymidine
  modified_base (21)..(21): 5'-thio thymidine
caggaagcguggaugcuggtt

SEQ ID NO: 717 - DNA, 21 bp, Artificial Sequence
  Description of Artificial Sequence: Synthetic oligonucleotide
  Description of Combined DNA/RNA Molecule: Synthetic oligonucleotide
  siRNAs to PCSK9
  modified_base (1)..(1): 2'-O-methyl corresponding base
  modified_base (2)..(2): 2'-O-methyl corresponding base
  modified_base (3)..(3): 2'-hydroxy corresponding base
  modified_base (4)..(4): 2'-hydroxy corresponding base
  modified_base (5)..(5): 2'-O-methyl corresponding base
  modified_base (6)..(6): 2'-hydroxy corresponding base
  modified_base (7)..(7): 2'-O-methyl corresponding base
  modified_base (8)..(8): 2'-O-methyl corresponding base
  modified_base (9)..(9): 2'-O-methyl corresponding base
  modified_base (10)..(10): 2'-hydroxy corresponding base
  modified_base (11)..(11): 2'-O-methyl corresponding base
  modified_base (12)..(12): 2'-hydroxy corresponding base
  modified_base (13)..(13): 2'-O-methyl corresponding base
  modified_base (14)..(14): 2'-O-methyl corresponding base
  modified_base (15)..(15): 2'-O-methyl corresponding base
  modified_base (16)..(16): 2'-O-methyl corresponding base
  modified_base (17)..(17): 2'-O-methyl corresponding base
  modified_base (18)..(18): 2'-O-methyl corresponding base
  modified_base (19)..(19): 2'-hydroxy corresponding base
  modified_base (20)..(20): deoxythymidine
  modified_base (21)..(21): 5'-thio thymidine
ccagcauccacgcuuccugtt

SEQ ID NO: 718 - DNA, 21 bp, Artificial Sequence
  Description of Artificial Sequence: Synthetic oligonucleotide
  Description of Combined DNA/RNA Molecule: Synthetic oligonucleotide
  siRNAs to PCSK9
  modified_base (1)..(1): 2'-O-methyl corresponding base
  modified_base (2)..(2): 2'-hydroxy corresponding base
  modified_base (3)..(3): 2'-hydroxy corresponding base
  modified_base (4)..(4): 2'-hydroxy corresponding base
  modified_base (5)..(5): 2'-hydroxy corresponding base
  modified_base (6)..(6): 2'-hydroxy corresponding base
  modified_base (7)..(7): 2'-hydroxy corresponding base
  modified_base (8)..(8): 2'-hydroxy corresponding base
  modified_base (9)..(9): 2'-hydroxy corresponding base
  modified_base (10)..(10): 2'-hydroxy corresponding base
  modified_base (11)..(11): 2'-hydroxy corresponding base
  modified_base (12)..(12): 2'-hydroxy corresponding base
  modified_base (13)..(13): 2'-hydroxy corresponding base
  modified_base (14)..(14): 2'-hydroxy corresponding base
  modified_base (15)..(15): 2'-hydroxy corresponding base
  modified_base (16)..(16): 2'-hydroxy corresponding base
  modified_base (17)..(17): 2'-hydroxy corresponding base
  modified_base (18)..(18): 2'-hydroxy corresponding base
  modified_base (19)..(19): 2'-hydroxy corresponding base
  modified_base (20)..(20): deoxythymidine
  modified_base (21)..(21): 5'-thio thymidine
caggaagcguggaugcuggtt

SEQ ID NO: 719 - DNA, 21 bp, Artificial Sequence
  Description of Artificial Sequence: Synthetic oligonucleotide
  Description of Combined DNA/RNA Molecule: Synthetic oligonucleotide
  siRNAs to PCSK9
  modified_base (1)..(1): 2'-hydroxy corresponding base
  modified_base (2)..(2): 2'-hydroxy corresponding base
  modified_base (3)..(3): 2'-hydroxy corresponding base
  modified_base (4)..(4): 2'-hydroxy corresponding base
  modified_base (5)..(5): 2'-hydroxy corresponding base
  modified_base (6)..(6): 2'-hydroxy corresponding base
  modified_base (7)..(7): 2'-hydroxy corresponding base
  modified_base (8)..(8): 2'-hydroxy corresponding base
  modified_base (9)..(9): 2'-hydroxy corresponding base
  modified_base (10)..(10): 2'-hydroxy corresponding base
  modified_base (11)..(11): 2'-hydroxy corresponding base
  modified_base (12)..(12): 2'-hydroxy corresponding base
  modified_base (13)..(13): 2'-hydroxy corresponding base
  modified_base (14)..(14): 2'-hydroxy corresponding base
  modified_base (15)..(15): 2'-hydroxy corresponding base
  modified_base (16)..(16): 2'-hydroxy corresponding base
  modified_base (17)..(17): 2'-hydroxy corresponding base
  modified_base (18)..(18): 2'-hydroxy corresponding base
  modified_base (19)..(19): 2'-hydroxy corresponding base
  modified_base (20)..(20): deoxythymidine
  modified_base (21)..(21): 5'-thio thymidine
agucaaggagcauggaauctt

SEQ ID NO: 720 - DNA, 21 bp, Artificial Sequence
  Description of Artificial Sequence: Synthetic oligonucleotide
  Description of Combined DNA/RNA Molecule: Synthetic oligonucleotide
  siRNAs to PCSK9
  modified_base (1)..(1): 2'-hydroxy corresponding base
  modified_base (2)..(2): 2'-hydroxy corresponding base
  modified_base (3)..(3): 2'-hydroxy corresponding base
  modified_base (4)..(4): 2'-hydroxy corresponding base
  modified_base (5)..(5): 2'-hydroxy corresponding base
  modified_base (6)..(6): 2'-hydroxy corresponding base
  modified_base (7)..(7): 2'-hydroxy corresponding base
  modified_base (8)..(8): 2'-hydroxy corresponding base
  modified_base (9)..(9): 2'-hydroxy corresponding base
  modified_base (10)..(10): 2'-hydroxy corresponding base
  modified_base (11)..(11): 2'-hydroxy corresponding base
  modified_base (12)..(12): 2'-hydroxy corresponding base
  modified_base (13)..(13): 2'-hydroxy corresponding base
  modified_base (14)..(14): 2'-hydroxy corresponding base
  modified_base (15)..(15): 2'-hydroxy corresponding base
  modified_base (16)..(16): 2'-hydroxy corresponding base
  modified_base (17)..(17): 2'-hydroxy corresponding base
  modified_base (18)..(18): 2'-hydroxy corresponding base
  modified_base (19)..(19): 2'-hydroxy corresponding base
  modified_base (20)..(20): deoxythymidine
  modified_base (21)..(21): 5'-thio thymidine
gauuccaugcuccuugacutt

SEQ ID NO: 721 - DNA, 21 bp, Artificial Sequence
  Description of Artificial Sequence: Synthetic oligonucleotide
  Description of Combined DNA/RNA Molecule: Synthetic oligonucleotide
  siRNAs to PCSK9
  modified_base (1)..(1): 2'-hydroxy corresponding base
  modified_base (2)..(2): 2'-hydroxy corresponding base
  modified_base (3)..(3): 2'-O-methyl corresponding base
  modified_base (4)..(4): 2'-O-methyl corresponding base
  modified_base (5)..(5): 2'-hydroxy corresponding base
  modified_base (6)..(6): 2'-hydroxy corresponding base
  modified_base (7)..(7): 2'-hydroxy corresponding base
  modified_base (8)..(8): 2'-hydroxy corresponding base
  modified_base (9)..(9): 2'-hydroxy corresponding base
  modified_base (10)..(10): 2'-hydroxy corresponding base
  modified_base (11)..(11): 2'-O-methyl corresponding base
  modified_base (12)..(12): 2'-hydroxy corresponding base
  modified_base (13)..(13): 2'-O-methyl corresponding base
  modified_base (14)..(14): 2'-hydroxy corresponding base
  modified_base (15)..(15): 2'-hydroxy corresponding base
  modified_base (16)..(16): 2'-hydroxy corresponding base
  modified_base (17)..(17): 2'-hydroxy corresponding base
  modified_base (18)..(18): 2'-O-methyl corresponding base
  modified_base (19)..(19): 2'-O-methyl corresponding base
  modified_base (20)..(20): deoxythymidine
  modified_base (21)..(21): 5'-thio thymidine
agucaaggagcauggaauctt

SEQ ID NO: 722 - DNA, 21 bp, Artificial Sequence
  Description of Artificial Sequence: Synthetic oligonucleotide
  Description of Combined DNA/RNA Molecule: Synthetic oligonucleotide
  siRNAs to PCSK9
  modified_base (1)..(1): 2'-hydroxy corresponding base
  modified_base (2)..(2): 2'-hydroxy corresponding base
  modified_base (3)..(3): 2'-hydroxy corresponding base
  modified_base (4)..(4): 2'-hydroxy corresponding base
  modified_base (5)..(5): 2'-hydroxy corresponding base
  modified_base (6)..(6): 2'-O-methyl corresponding base
  modified_base (7)..(7): 2'-hydroxy corresponding base
  modified_base (8)..(8): 2'-hydroxy corresponding base
  modified_base (9)..(9): 2'-hydroxy corresponding base
  modified_base (10)..(10): 2'-hydroxy corresponding base
  modified_base (11)..(11): 2'-hydroxy corresponding base
  modified_base (12)..(12): 2'-hydroxy corresponding base
  modified_base (13)..(13): 2'-hydroxy corresponding base
  modified_base (14)..(14): 2'-hydroxy corresponding base
  modified_base (15)..(15): 2'-hydroxy corresponding base
  modified_base (16)..(16): 2'-hydroxy corresponding base
  modified_base (17)..(17): 2'-hydroxy corresponding base
  modified_base (18)..(18): 2'-hydroxy corresponding base
  modified_base (19)..(19): 2'-hydroxy corresponding base
  modified_base (20)..(20): deoxythymidine
  modified_base (21)..(21): 5'-thio thymidine
gauuccaugcuccuugacutt

SEQ ID NO: 723 - DNA, 21 bp, Artificial Sequence
  Description of Artificial Sequence: Synthetic oligonucleotide
  Description of Combined DNA/RNA Molecule: Synthetic oligonucleotide
  siRNAs to PCSK9
  modified_base (1)..(1): 2'-deoxy-2'-fluoro corresponding base
  modified_base (2)..(2): 2'-O-methyl corresponding base
  modified_base (3)..(3): 2'-deoxy-2'-fluoro corresponding base
  modified_base (4)..(4): 2'-O-methyl corresponding base
  modified_base (5)..(5): 2'-deoxy-2'-fluoro corresponding base
  modified_base (6)..(6): 2'-O-methyl corresponding base
  modified_base (7)..(7): 2'-deoxy-2'-fluoro corresponding base
  modified_base (8)..(8): 2'-O-methyl corresponding base
  modified_base (9)..(9): 2'-deoxy-2'-fluoro corresponding base
  modified_base (10)..(10): 2'-O-methyl corresponding base
  modified_base (11)..(11): 2'-deoxy-2'-fluoro corresponding base
  modified_base (12)..(12): 2'-O-methyl corresponding base
  modified_base (13)..(13): 2'-deoxy-2'-fluoro corresponding base
  modified_base (14)..(14): 2'-O-methyl corresponding base
  modified_base (15)..(15): 2'-deoxy-2'-fluoro corresponding base
  modified_base (16)..(16): 2'-O-methyl corresponding base
  modified_base (17)..(17): 2'-deoxy-2'-fluoro corresponding base
  modified_base (18)..(18): 2'-O-methyl corresponding base
  modified_base (19)..(19): 2'-deoxy-2'-fluoro corresponding base
  modified_base (20)..(20): deoxythymidine
  modified_base (21)..(21): 5'-thio thymidine
agucaaggagcauggaauctt

SEQ ID NO: 724 - DNA, 21 bp, Artificial Sequence
  Description of Artificial Sequence: Synthetic oligonucleotide
  Description of Combined DNA/RNA Molecule: Synthetic oligonucleotide
  siRNAs to PCSK9
  modified_base (1)..(1): 2'-O-methyl corresponding base
  modified_base (2)..(2): 2'-deoxy-2'-fluoro corresponding base
  modified_base (3)..(3): 2'-O-methyl corresponding base
  modified_base (4)..(4): 2'-deoxy-2'-fluoro corresponding base
  modified_base (5)..(5): 2'-O-methyl corresponding base
  modified_base (6)..(6): 2'-deoxy-2'-fluoro corresponding base
  modified_base (7)..(7): 2'-O-methyl corresponding base
  modified_base (8)..(8): 2'-deoxy-2'-fluoro corresponding base
  modified_base (9)..(9): 2'-O-methyl corresponding base
  modified_base (10)..(10): 2'-deoxy-2'-fluoro corresponding base
  modified_base (11)..(11): 2'-O-methyl corresponding base
  modified_base (12)..(12): 2'-deoxy-2'-fluoro corresponding base
  modified_base (13)..(13): 2'-O-methyl corresponding base
  modified_base (14)..(14): 2'-deoxy-2'-fluoro corresponding base
  modified_base (15)..(15): 2'-O-methyl corresponding base
  modified_base (16)..(16): 2'-deoxy-2'-fluoro corresponding base
  modified_base (17)..(17): 2'-O-methyl corresponding base
  modified_base (18)..(18): 2'-deoxy-2'-fluoro corresponding base
  modified_base (19)..(19): 2'-O-methyl corresponding base
  modified_base (20)..(20): deoxythymidine
  modified_base (21)..(21): 5'-thio thymidine
gauuccaugcuccuugacutt

SEQ ID NO: 725 - DNA, 21 bp, Artificial Sequence
  Description of Artificial Sequence: Synthetic oligonucleotide
  Description of Combined DNA/RNA Molecule: Synthetic oligonucleotide
  siRNAs to PCSK9
  modified_base (1)..(1): 2'-hydroxy corresponding base
  modified_base (2)..(2): 2'-hydroxy corresponding base
  modified_base (3)..(3): 2'-deoxy-2'-fluoro corresponding base
  modified_base (4)..(4): 2'-deoxy-2'-fluoro corresponding base
  modified_base (5)..(5): 2'-hydroxy corresponding base
  modified_base (6)..(6): 2'-hydroxy corresponding base
  modified_base (7)..(7): 2'-hydroxy corresponding base
  modified_base (8)..(8): 2'-hydroxy corresponding base
  modified_base (9)..(9): 2'-hydroxy corresponding base
  modified_base (10)..(10): 2'-hydroxy corresponding base
  modified_base (11)..(11): 2'-deoxy-2'-fluoro corresponding base
  modified_base (12)..(12): 2'-hydroxy corresponding base
  modified_base (13)..(13): 2'-deoxy-2'-fluoro corresponding base
  modified_base (14)..(14): 2'-hydroxy corresponding base
  modified_base (15)..(15): 2'-hydroxy corresponding base
  modified_base (16)..(16): 2'-hydroxy corresponding base
  modified_base (17)..(17): 2'-hydroxy corresponding base
  modified_base (18)..(18): 2'-deoxy-2'-fluoro corresponding base
  modified_base (19)..(19): 2'-deoxy-2'-fluoro corresponding base
  modified_base (20)..(20): deoxythymidine
  modified_base (21)..(21): 5'-thio thymidine
agucaaggagcauggaauctt

SEQ ID NO: 726 - DNA, 21 bp, Artificial Sequence
  Description of Artificial Sequence: Synthetic oligonucleotide
  Description of Combined DNA/RNA Molecule: Synthetic oligonucleotide
  siRNAs to PCSK9
  modified_base (1)..(1): 2'-hydroxy corresponding base
  modified_base (2)..(2): 2'-hydroxy corresponding base
  modified_base (3)..(3): 2'-deoxy-2'-fluoro corresponding base
  modified_base (4)..(4): 2'-deoxy-2'-fluoro corresponding base
  modified_base (5)..(5): 2'-deoxy-2'-fluoro corresponding base
  modified_base (6)..(6): 2'-deoxy-2'-fluoro corresponding base
  modified_base (7)..(7): 2'-hydroxy corresponding base
  modified_base (8)..(8): 2'-deoxy-2'-fluoro corresponding base
  modified_base (9)..(9): 2'-hydroxy corresponding base
  modified_base (10)..(10): 2'-deoxy-2'-fluoro corresponding base
  modified_base (11)..(11): 2'-deoxy-2'-fluoro corresponding base
  modified_base (12)..(12): 2'-deoxy-2'-fluoro corresponding base
  modified_base (13)..(13): 2'-deoxy-2'-fluoro corresponding base
  modified_base (14)..(14): 2'-deoxy-2'-fluoro corresponding base
  modified_base (15)..(15): 2'-deoxy-2'-fluoro corresponding base
  modified_base (16)..(16): 2'-hydroxy corresponding base
  modified_base (17)..(17): 2'-hydroxy corresponding base
  modified_base (18)..(18): 2'-deoxy-2'-fluoro corresponding base
  modified_base (19)..(19): 2'-deoxy-2'-fluoro corresponding base
  modified_base (20)..(20): deoxythymidine
  modified_base (21)..(21): 5'-thio thymidine
gauuccaugcuccuugacutt

SEQ ID NO: 727 - DNA, 21 bp, Artificial Sequence
  Description of Artificial Sequence: Synthetic oligonucleotide
  Description of Combined DNA/RNA Molecule: Synthetic oligonucleotide
  siRNAs to PCSK9
  modified_base (1)..(1): 2'-hydroxy corresponding base
  modified_base (2)..(2): 2'-O-methyl corresponding base
  modified_base (3)..(3): 2'-hydroxy corresponding base
  modified_base (4)..(4): 2'-O-methyl corresponding base
  modified_base (5)..(5): 2'-hydroxy corresponding base
  modified_base (6)..(6): 2'-O-methyl corresponding base
  modified_base (7)..(7): 2'-hydroxy corresponding base
  modified_base (8)..(8): 2'-O-methyl corresponding base
  modified_base (9)..(9): 2'-hydroxy corresponding base
  modified_base (10)..(10): 2'-O-methyl corresponding base
  modified_base (11)..(11): 2'-hydroxy corresponding base
  modified_base (12)..(12): 2'-O-methyl corresponding base
  modified_base (13)..(13): 2'-hydroxy corresponding base
  modified_base (14)..(14): 2'-O-methyl corresponding base
  modified_base (15)..(15): 2'-hydroxy corresponding base
  modified_base (16)..(16): 2'-O-methyl corresponding base
  modified_base (17)..(17): 2'-hydroxy corresponding base
  modified_base (18)..(18): 2'-O-methyl corresponding base
  modified_base (19)..(19): 2'-hydroxy corresponding base
  modified_base (20)..(20): deoxythymidine
  modified_base (21)..(21): 5'-thio thymidine
agucaaggagcauggaauctt

SEQ ID NO: 728 - DNA, 21 bp, Artificial Sequence
  Description of Artificial Sequence: Synthetic oligonucleotide
  Description of Combined DNA/RNA Molecule: Synthetic oligonucleotide
  siRNAs to PCSK9
  modified_base (1)..(1): 2'-O-methyl corresponding base
  modified_base (2)..(2): 2'-deoxy-2'-fluoro corresponding base
  modified_base (3)..(3): 2'-O-methyl corresponding base
  modified_base (4)..(4): 2'-deoxy-2'-fluoro corresponding base
  modified_base (5)..(5): 2'-O-methyl corresponding base
  modified_base (6)..(6): 2'-deoxy-2'-fluoro corresponding base
  modified_base (7)..(7): 2'-O-methyl corresponding base
  modified_base (8)..(8): 2'-deoxy-2'-fluoro corresponding base
  modified_base (9)..(9): 2'-O-methyl corresponding base
  modified_base (10)..(10): 2'-deoxy-2'-fluoro corresponding base
  modified_base (11)..(11): 2'-O-methyl corresponding base
  modified_base (12)..(12): 2'-deoxy-2'-fluoro corresponding base
  modified_base (13)..(13): 2'-O-methyl corresponding base
  modified_base (14)..(14): 2'-deoxy-2'-fluoro corresponding base
  modified_base (15)..(15): 2'-O-methyl corresponding base
  modified_base (16)..(16): 2'-deoxy-2'-fluoro corresponding base
  modified_base (17)..(17): 2'-O-methyl corresponding base
  modified_base (18)..(18): 2'-deoxy-2'-fluoro corresponding base
  modified_base (19)..(19): 2'-O-methyl corresponding base
  modified_base (20)..(20): deoxythymidine
  modified_base (21)..(21): 5'-thio thymidine
gauuccaugcuccuugacutt

SEQ ID NO: 729 - DNA, 21 bp, Artificial Sequence
  Description of Artificial Sequence: Synthetic oligonucleotide
  Description of Combined DNA/RNA Molecule: Synthetic oligonucleotide
  siRNAs to PCSK9
  modified_base (1)..(1): 2'-hydroxy corresponding base
  modified_base (2)..(2): 2'-O-methyl corresponding base
  modified_base (3)..(3): 2'-hydroxy corresponding base
  modified_base (4)..(4): 2'-O-methyl corresponding base
  modified_base (5)..(5): 2'-hydroxy corresponding base
  modified_base (6)..(6): 2'-O-methyl corresponding base
  modified_base (7)..(7): 2'-hydroxy corresponding base
  modified_base (8)..(8): 2'-O-methyl corresponding base
  modified_base (9)..(9): 2'-hydroxy corresponding base
  modified_base (10)..(10): 2'-O-methyl corresponding base
  modified_base (11)..(11): 2'-hydroxy corresponding base
  modified_base (12)..(12): 2'-O-methyl corresponding base
  modified_base (13)..(13): 2'-hydroxy corresponding base
  modified_base (14)..(14): 2'-O-methyl corresponding base
  modified_base (15)..(15): 2'-hydroxy corresponding base
  modified_base (16)..(16): 2'-O-methyl corresponding base
  modified_base (17)..(17): 2'-hydroxy corresponding base
  modified_base (18)..(18): 2'-O-methyl corresponding base
  modified_base (19)..(19): 2'-hydroxy corresponding base
  modified_base (20)..(20): deoxythymidine
  modified_base (21)..(21): 5'-thio thymidine
agucaaggagcauggaauctt

SEQ ID NO: 730 - DNA, 21 bp, Artificial Sequence
  Description of Artificial Sequence: Synthetic oligonucleotide
  Description of Combined DNA/RNA Molecule: Synthetic oligonucleotide
  siRNAs to PCSK9
  modified_base (1)..(1): 2'-hydroxy corresponding base
  modified_base (2)..(2): 2'-hydroxy corresponding base
  modified_base (3)..(3): 2'-deoxy-2'-fluoro corresponding base
  modified_base (4)..(4): 2'-deoxy-2'-fluoro corresponding base
  modified_base (5)..(5): 2'-deoxy-2'-fluoro corresponding base
  modified_base (6)..(6): 2'-deoxy-2'-fluoro corresponding base
  modified_base (7)..(7): 2'-hydroxy corresponding base
  modified_base (8)..(8): 2'-deoxy-2'-fluoro corresponding base
  modified_base (9)..(9): 2'-hydroxy corresponding base
  modified_base (10)..(10): 2'-deoxy-2'-fluoro corresponding base
  modified_base (11)..(11): 2'-deoxy-2'-fluoro corresponding base
  modified_base (12)..(12): 2'-deoxy-2'-fluoro corresponding base
  modified_base (13)..(13): 2'-deoxy-2'-fluoro corresponding base
  modified_base (14)..(14): 2'-deoxy-2'-fluoro corresponding base
  modified_base (15)..(15): 2'-deoxy-2'-fluoro corresponding base
  modified_base (16)..(16): 2'-hydroxy corresponding base
  modified_base (17)..(17): 2'-hydroxy corresponding base
  modified_base (18)..(18): 2'-deoxy-2'-fluoro corresponding base
  modified_base (19)..(19): 2'-deoxy-2'-fluoro corresponding base
  modified_base (20)..(20): deoxythymidine
  modified_base (21)..(21): 5'-thio thymidine
gauuccaugcuccuugacutt

SEQ ID NO: 731 - DNA, 21 bp, Artificial Sequence
  Description of Artificial Sequence: Synthetic oligonucleotide
  Description of Combined DNA/RNA Molecule: Synthetic oligonucleotide
  siRNAs to PCSK9
  modified_base (1)..(1): 2'-deoxy-2'-fluoro corresponding base
  modified_base (2)..(2): 2'-O-methyl corresponding base
  modified_base (3)..(3): 2'-deoxy-2'-fluoro corresponding base
  modified_base (4)..(4): 2'-O-methyl corresponding base
  modified_base (5)..(5): 2'-deoxy-2'-fluoro corresponding base
  modified_base (6)..(6): 2'-O-methyl corresponding base
  modified_base (7)..(7): 2'-deoxy-2'-fluoro corresponding base
  modified_base (8)..(8): 2'-O-methyl corresponding base
  modified_base (9)..(9): 2'-deoxy-2'-fluoro corresponding base
  modified_base (10)..(10): 2'-O-methyl corresponding base
  modified_base (11)..(11): 2'-deoxy-2'-fluoro corresponding base
  modified_base (12)..(12): 2'-O-methyl corresponding base
  modified_base (13)..(13): 2'-deoxy-2'-fluoro corresponding base
  modified_base (14)..(14): 2'-O-methyl corresponding base
  modified_base (15)..(15): 2'-deoxy-2'-fluoro corresponding base
  modified_base (16)..(16): 2'-O-methyl corresponding base
  modified_base (17)..(17): 2'-deoxy-2'-fluoro corresponding base
  modified_base (18)..(18): 2'-O-methyl corresponding base
  modified_base (19)..(19): 2'-deoxy-2'-fluoro corresponding base
  modified_base (20)..(20): deoxythymidine
  modified_base (21)..(21): 5'-thio thymidine
agucaaggagcauggaauctt

SEQ ID NO: 732 - DNA, 21 bp, Artificial Sequence
  Description of Artificial Sequence: Synthetic oligonucleotide
  Description of Combined DNA/RNA Molecule: Synthetic oligonucleotide
  siRNAs to PCSK9
  modified_base (1)..(1): 2'-hydroxy corresponding base
  modified_base (2)..(2): 2'-hydroxy corresponding base
  modified_base (3)..(3): 2'-hydroxy corresponding base
  modified_base (4)..(4): 2'-hydroxy corresponding base
  modified_base (5)..(5): 2'-hydroxy corresponding base
  modified_base (6)..(6): 2'-O-methyl corresponding base
  modified_base (7)..(7): 2'-O-methyl corresponding base
  modified_base (8)..(8): 2'-hydroxy corresponding base
  modified_base (9)..(9): 2'-hydroxy corresponding base
  modified_base (10)..(10): 2'-O-methyl corresponding base
  modified_base (11)..(11): 2'-O-methyl corresponding base
  modified_base (12)..(12): 2'-hydroxy corresponding base
  modified_base (13)..(13): 2'-hydroxy corresponding base
  modified_base (14)..(14): 2'-hydroxy corresponding base
  modified_base (15)..(15): 2'-hydroxy corresponding base
  modified_base (16)..(16): 2'-hydroxy corresponding base
  modified_base (17)..(17): 2'-O-methyl corresponding base
  modified_base (18)..(18): 2'-O-methyl corresponding base
  modified_base (19)..(19): 2'-O-methyl corresponding base
  modified_base (20)..(20): deoxythymidine
  modified_base (21)..(21): 5'-thio thymidine
gauuccaugcuccuugacutt

SEQ ID NO: 733 - DNA, 21 bp, Artificial Sequence
  Description of Artificial Sequence: Synthetic oligonucleotide
  Description of Combined DNA/RNA Molecule: Synthetic oligonucleotide
  siRNAs to PCSK9
  modified_base (1)..(1): 2'-hydroxy corresponding base
  modified_base (2)..(2): 2'-hydroxy corresponding base
  modified_base (3)..(3): 2'-deoxy-2'-fluoro corresponding base
  modified_base (4)..(4): 2'-deoxy-2'-fluoro corresponding base
  modified_base (5)..(5): 2'-hydroxy corresponding base
  modified_base (6)..(6): 2'-hydroxy corresponding base
  modified_base (7)..(7): 2'-hydroxy corresponding base
  modified_base (8)..(8): 2'-hydroxy corresponding base
  modified_base (9)..(9): 2'-hydroxy corresponding base
  modified_base (10)..(10): 2'-hydroxy corresponding base
  modified_base (11)..(11): 2'-deoxy-2'-fluoro corresponding base
  modified_base (12)..(12): 2'-hydroxy corresponding base
  modified_base (13)..(13): 2'-deoxy-2'-fluoro corresponding base
  modified_base (14)..(14): 2'-hydroxy corresponding base
  modified_base (15)..(15): 2'-hydroxy corresponding base
  modified_base (16)..(16): 2'-hydroxy corresponding base
  modified_base (17)..(17): 2'-hydroxy corresponding base
  modified_base (18)..(18): 2'-deoxy-2'-fluoro corresponding base
  modified_base (19)..(19): 2'-deoxy-2'-fluoro corresponding base
  modified_base (20)..(20): deoxythymidine
  modified_base (21)..(21): 5'-thio thymidine
agucaaggagcauggaauctt

SEQ ID NO: 734 - DNA, 21 bp, Artificial Sequence
  Description of Artificial Sequence: Synthetic oligonucleotide
  Description of Combined DNA/RNA Molecule: Synthetic oligonucleotide
  siRNAs to PCSK9
  modified_base (1)..(1): 2'-hydroxy corresponding base
  modified_base (2)..(2): 2'-hydroxy corresponding base
  modified_base (3)..(3): 2'-hydroxy corresponding base
  modified_base (4)..(4): 2'-hydroxy corresponding base
  modified_base (5)..(5): 2'-hydroxy corresponding base
  modified_base (6)..(6): 2'-O-methyl corresponding base
  modified_base (7)..(7): 2'-O-methyl corresponding base
  modified_base (8)..(8): 2'-hydroxy corresponding base
  modified_base (9)..(9): 2'-hydroxy corresponding base
  modified_base (10)..(10): 2'-O-methyl corresponding base
  modified_base (11)..(11): 2'-O-methyl corresponding base
  modified_base (12)..(12): 2'-hydroxy corresponding base
  modified_base (13)..(13): 2'-hydroxy corresponding base
  modified_base (14)..(14): 2'-hydroxy corresponding base
  modified_base (15)..(15): 2'-hydroxy corresponding base
  modified_base (16)..(16): 2'-hydroxy corresponding base
  modified_base (17)..(17): 2'-O-methyl corresponding base
  modified_base (18)..(18): 2'-O-methyl corresponding base
  modified_base (19)..(19): 2'-O-methyl corresponding base
  modified_base (20)..(20): deoxythymidine
  modified_base (21)..(21): 5'-thio thymidine
gauuccaugcuccuugacutt

SEQ ID NO: 735 - DNA, 21 bp, Artificial Sequence
  Description of Artificial Sequence: Synthetic oligonucleotide
  Description of Combined DNA/RNA Molecule: Synthetic oligonucleotide
  siRNAs to PCSK9
  modified_base (1)..(1): 2'-hydroxy corresponding base
  modified_base (2)..(2): 2'-O-methyl corresponding base
  modified_base (3)..(3): 2'-hydroxy corresponding base
  modified_base (4)..(4): 2'-O-methyl corresponding base
  modified_base (5)..(5): 2'-hydroxy corresponding base
  modified_base (6)..(6): 2'-O-methyl corresponding base
  modified_base (7)..(7): 2'-hydroxy corresponding base
  modified_base (8)..(8): 2'-O-methyl corresponding base
  modified_base (9)..(9): 2'-hydroxy corresponding base
  modified_base (10)..(10): 2'-O-methyl corresponding base
  modified_base (11)..(11): 2'-hydroxy corresponding base
  modified_base (12)..(12): 2'-O-methyl corresponding base
  modified_base (13)..(13): 2'-hydroxy corresponding base
  modified_base (14)..(14): 2'-O-methyl corresponding base
  modified_base (15)..(15): 2'-hydroxy corresponding base
  modified_base (16)..(16): 2'-O-methyl corresponding base
  modified_base (17)..(17): 2'-hydroxy corresponding base
  modified_base (18)..(18): 2'-O-methyl corresponding base
  modified_base (19)..(19): 2'-hydroxy corresponding base
  modified_base (20)..(20): deoxythymidine
  modified_base (21)..(21): 5'-thio thymidine
agucaaggagcauggaauctt

SEQ ID NO: 736 - DNA, 21 bp, Artificial Sequence
  Description of Artificial Sequence: Synthetic oligonucleotide
  Description of Combined DNA/RNA Molecule: Synthetic oligonucleotide
  siRNAs to PCSK9
  modified_base (1)..(1): 2'-hydroxy corresponding base
  modified_base (2)..(2): 2'-hydroxy corresponding base
  modified_base (3)..(3): 2'-hydroxy corresponding base
  modified_base (4)..(4): 2'-hydroxy corresponding base
  modified_base (5)..(5): 2'-hydroxy corresponding base
  modified_base (6)..(6): 2'-O-methyl corresponding base
  modified_base (7)..(7): 2'-O-methyl corresponding base
  modified_base (8)..(8): 2'-hydroxy corresponding base
  modified_base (9)..(9): 2'-hydroxy corresponding base
  modified_base (10)..(10): 2'-O-methyl corresponding base
  modified_base (11)..(11): 2'-O-methyl corresponding base
  modified_base (12)..(12): 2'-hydroxy corresponding base
  modified_base (13)..(13): 2'-hydroxy corresponding base
  modified_base (14)..(14): 2'-hydroxy corresponding base
  modified_base (15)..(15): 2'-hydroxy corresponding base
  modified_base (16)..(16): 2'-hydroxy corresponding base
  modified_base (17)..(17): 2'-O-methyl corresponding base
  modified_base (18)..(18): 2'-O-methyl corresponding base
  modified_base (19)..(19): 2'-O-methyl corresponding base
  modified_base (20)..(20): deoxythymidine
  modified_base (21)..(21): 5'-thio thymidine
gauuccaugcuccuugacutt

SEQ ID NO: 737 - DNA, 21 bp, Artificial Sequence
  Description of Artificial Sequence: Synthetic oligonucleotide
  Description of Combined DNA/RNA Molecule: Synthetic oligonucleotide
  siRNAs to PCSK9
  modified_base (1)..(1): 2'-deoxy-2'-fluoro corresponding base
  modified_base (2)..(2): 2'-O-methyl corresponding base
  modified_base (3)..(3): 2'-deoxy-2'-fluoro corresponding base
  modified_base (4)..(4): 2'-O-methyl corresponding base
  modified_base (5)..(5): 2'-deoxy-2'-fluoro corresponding base
  modified_base (6)..(6): 2'-O-methyl corresponding base
  modified_base (7)..(7): 2'-deoxy-2'-fluoro corresponding base
  modified_base (8)..(8): 2'-O-methyl corresponding base
  modified_base (9)..(9): 2'-deoxy-2'-fluoro corresponding base
  modified_base (10)..(10): 2'-O-methyl corresponding base
  modified_base (11)..(11): 2'-deoxy-2'-fluoro corresponding base
  modified_base (12)..(12): 2'-O-methyl corresponding base
  modified_base (13)..(13): 2'-deoxy-2'-fluoro corresponding base
  modified_base (14)..(14): 2'-O-methyl corresponding base
  modified_base (15)..(15): 2'-deoxy-2'-fluoro corresponding base
  modified_base (16)..(16): 2'-O-methyl corresponding base
  modified_base (17)..(17): 2'-deoxy-2'-fluoro corresponding base
  modified_base (18)..(18): 2'-O-methyl corresponding base
  modified_base (19)..(19): 2'-deoxy-2'-fluoro corresponding base
  modified_base (20)..(20): deoxythymidine
  modified_base (21)..(21): 5'-thio thymidine
gcggcacccucauaggccutt

SEQ ID NO: 738 - DNA, 21 bp, Artificial Sequence
  Description of Artificial Sequence: Synthetic oligonucleotide
  Description of Combined DNA/RNA Molecule: Synthetic oligonucleotide
  siRNAs to PCSK9
  modified_base (1)..(1): 2'-O-methyl corresponding base
  modified_base (2)..(2): 2'-deoxy-2'-fluoro corresponding base
  modified_base (3)..(3): 2'-O-methyl corresponding base
  modified_base (4)..(4): 2'-deoxy-2'-fluoro corresponding base
  modified_base (5)..(5): 2'-O-methyl corresponding base
  modified_base (6)..(6): 2'-deoxy-2'-fluoro corresponding base
  modified_base (7)..(7): 2'-O-methyl corresponding base
  modified_base (8)..(8): 2'-deoxy-2'-fluoro corresponding base
  modified_base (9)..(9): 2'-O-methyl corresponding base
  modified_base (10)..(10): 2'-deoxy-2'-fluoro corresponding base
  modified_base (11)..(11): 2'-O-methyl corresponding base
  modified_base (12)..(12): 2'-deoxy-2'-fluoro corresponding base
  modified_base (13)..(13): 2'-O-methyl corresponding base
  modified_base (14)..(14): 2'-deoxy-2'-fluoro corresponding base
  modified_base (15)..(15): 2'-O-methyl corresponding base
  modified_base (16)..(16): 2'-deoxy-2'-fluoro corresponding base
  modified_base (17)..(17): 2'-O-methyl corresponding base
  modified_base (18)..(18): 2'-deoxy-2'-fluoro corresponding base
  modified_base (19)..(19): 2'-O-methyl corresponding base
  modified_base (20)..(20): deoxythymidine
  modified_base (21)..(21): 5'-thio thymidine
aggccuaugagggugccgctt

SEQ ID NO: 739 - DNA, 21 bp, Artificial Sequence
  Description of Artificial Sequence: Synthetic oligonucleotide
  Description of Combined DNA/RNA Molecule: Synthetic oligonucleotide
  siRNAs to PCSK9
  modified_base (1)..(1): 2'-hydroxy corresponding base
  modified_base (2)..(2): 2'-deoxy-2'-fluoro corresponding base
  modified_base (3)..(3): 2'-hydroxy corresponding base
  modified_base (4)..(4): 2'-hydroxy corresponding base
  modified_base (5)..(5): 2'-deoxy-2'-fluoro corresponding base
  modified_base (6)..(6): 2'-hydroxy corresponding base
  modified_base (7)..(7): 2'-deoxy-2'-fluoro corresponding base
  modified_base (8)..(8): 2'-deoxy-2'-fluoro corresponding base
  modified_base (9)..(9): 2'-deoxy-2'-fluoro corresponding base
  modified_base (10)..(10): 2'-deoxy-2'-fluoro corresponding base
  modified_base (11)..(11): 2'-deoxy-2'-fluoro corresponding base
  modified_base (12)..(12): 2'-hydroxy corresponding base
  modified_base (13)..(13): 2'-deoxy-2'-fluoro corresponding base
  modified_base (14)..(14): 2'-hydroxy corresponding base
  modified_base (15)..(15): 2'-hydroxy corresponding base
  modified_base (16)..(16): 2'-hydroxy corresponding base
  modified_base (17)..(17): 2'-deoxy-2'-fluoro corresponding base
  modified_base (18)..(18): 2'-deoxy-2'-fluoro corresponding base
  modified_base (19)..(19): 2'-deoxy-2'-fluoro corresponding base
  modified_base (20)..(20): deoxythymidine
  modified_base (21)..(21): 5'-thio thymidine
gcggcacccucauaggccutt

SEQ ID NO: 740 - DNA, 21 bp, Artificial Sequence
  Description of Artificial Sequence: Synthetic oligonucleotide
  Description of Combined DNA/RNA Molecule: Synthetic oligonucleotide
  siRNAs to PCSK9
  modified_base (1)..(1): 2'-hydroxy corresponding base
  modified_base (2)..(2): 2'-hydroxy corresponding base
  modified_base (3)..(3): 2'-hydroxy corresponding base
  modified_base (4)..(4): 2'-deoxy-2'-fluoro corresponding base
  modified_base (5)..(5): 2'-deoxy-2'-fluoro corresponding base
  modified_base (6)..(6): 2'-deoxy-2'-fluoro corresponding base
  modified_base (7)..(7): 2'-hydroxy corresponding base
  modified_base (8)..(8): 2'-deoxy-2'-fluoro corresponding base
  modified_base (9)..(9): 2'-hydroxy corresponding base
  modified_base (10)..(10): 2'-hydroxy corresponding base
  modified_base (11)..(11): 2'-hydroxy corresponding base
  modified_base (12)..(12): 2'-hydroxy corresponding base
  modified_base (13)..(13): 2'-hydroxy corresponding base
  modified_base (14)..(14): 2'-deoxy-2'-fluoro corresponding base
  modified_base (15)..(15): 2'-hydroxy corresponding base
  modified_base (16)..(16): 2'-deoxy-2'-fluoro corresponding base
  modified_base (17)..(17): 2'-deoxy-2'-fluoro corresponding base
  modified_base (18)..(18): 2'-hydroxy corresponding base
  modified_base (19)..(19): 2'-deoxy-2'-fluoro corresponding base
  modified_base (20)..(20): deoxythymidine
  modified_base (21)..(21): 5'-thio thymidine
aggccuaugagggugccgctt

SEQ ID NO: 741 - DNA, 21 bp, Artificial Sequence
  Description of Artificial Sequence: Synthetic oligonucleotide
  Description of Combined DNA/RNA Molecule: Synthetic oligonucleotide
  siRNAs to PCSK9
  modified_base (1)..(1): 2'-hydroxy corresponding base
  modified_base (2)..(2): 2'-O-methyl corresponding base
  modified_base (3)..(3): 2'-hydroxy corresponding base
  modified_base (4)..(4): 2'-O-methyl corresponding base
  modified_base (5)..(5): 2'-hydroxy corresponding base
  modified_base (6)..(6): 2'-O-methyl corresponding base
  modified_base (7)..(7): 2'-hydroxy corresponding base
  modified_base (8)..(8): 2'-O-methyl corresponding base
  modified_base (9)..(9): 2'-hydroxy corresponding base
  modified_base (10)..(10): 2'-O-methyl corresponding base
  modified_base (11)..(11): 2'-hydroxy corresponding base
  modified_base (12)..(12): 2'-O-methyl corresponding base
  modified_base (13)..(13): 2'-hydroxy corresponding base
  modified_base (14)..(14): 2'-O-methyl corresponding base
  modified_base (15)..(15): 2'-hydroxy corresponding base
  modified_base (16)..(16): 2'-O-methyl corresponding base
  modified_base (17)..(17): 2'-hydroxy corresponding base
  modified_base (18)..(18): 2'-O-methyl corresponding base
  modified_base (19)..(19): 2'-hydroxy corresponding base
  modified_base (20)..(20): deoxythymidine
  modified_base (21)..(21): 5'-thio thymidine
gcggcacccucauaggccutt

SEQ ID NO: 742 - DNA, 21 bp, Artificial Sequence
  Description of Artificial Sequence: Synthetic oligonucleotide
  Description of Combined DNA/RNA Molecule: Synthetic oligonucleotide
  siRNAs to PCSK9
  modified_base (1)..(1): 2'-O-methyl corresponding base
  modified_base (2)..(2): 2'-deoxy-2'-fluoro corresponding base
  modified_base (3)..(3): 2'-O-methyl corresponding base
  modified_base (4)..(4): 2'-deoxy-2'-fluoro corresponding base
  modified_base (5)..(5): 2'-O-methyl corresponding base
  modified_base (6)..(6): 2'-deoxy-2'-fluoro corresponding base
  modified_base (7)..(7): 2'-O-methyl corresponding base
  modified_base (8)..(8): 2'-deoxy-2'-fluoro corresponding base
  modified_base (9)..(9): 2'-O-methyl corresponding base
  modified_base (10)..(10): 2'-deoxy-2'-fluoro corresponding base
  modified_base (11)..(11): 2'-O-methyl corresponding base
  modified_base (12)..(12): 2'-deoxy-2'-fluoro corresponding base
  modified_base (13)..(13): 2'-O-methyl corresponding base
  modified_base (14)..(14): 2'-deoxy-2'-fluoro corresponding base
  modified_base (15)..(15): 2'-O-methyl corresponding base
  modified_base (16)..(16): 2'-deoxy-2'-fluoro corresponding base
  modified_base (17)..(17): 2'-O-methyl corresponding base
  modified_base (18)..(18): 2'-deoxy-2'-fluoro corresponding base
  modified_base (19)..(19): 2'-O-methyl corresponding base
  modified_base (20)..(20): deoxythymidine
  modified_base (21)..(21): 5'-thio thymidine
aggccuaugagggugccgctt

SEQ ID NO: 743 - DNA, 21 bp, Artificial Sequence
  Description of Artificial Sequence: Synthetic oligonucleotide
  Description of Combined DNA/RNA Molecule: Synthetic oligonucleotide
  siRNAs to PCSK9
  modified_base (1)..(1): 2'-hydroxy corresponding base
  modified_base (2)..(2): 2'-O-methyl corresponding base
  modified_base (3)..(3): 2'-hydroxy corresponding base
  modified_base (4)..(4): 2'-O-methyl corresponding base
  modified_base (5)..(5): 2'-hydroxy corresponding base
  modified_base (6)..(6): 2'-O-methyl corresponding base
  modified_base (7)..(7): 2'-hydroxy corresponding base
  modified_base (8)..(8): 2'-O-methyl corresponding base
  modified_base (9)..(9): 2'-hydroxy corresponding base
  modified_base (10)..(10): 2'-O-methyl corresponding base
  modified_base (11)..(11): 2'-hydroxy corresponding base
  modified_base (12)..(12): 2'-O-methyl corresponding base
  modified_base (13)..(13): 2'-hydroxy corresponding base
  modified_base (14)..(14): 2'-O-methyl corresponding base
  modified_base (15)..(15): 2'-hydroxy corresponding base
  modified_base (16)..(16): 2'-O-methyl corresponding base
  modified_base (17)..(17): 2'-hydroxy corresponding base
  modified_base (18)..(18): 2'-O-methyl corresponding base
  modified_base (19)..(19): 2'-hydroxy corresponding base
  modified_base (20)..(20): deoxythymidine
  modified_base (21)..(21): 5'-thio thymidine
gcggcacccucauaggccutt

SEQ ID NO: 744 - DNA, 21 bp, Artificial Sequence
  Description of Artificial Sequence: Synthetic oligonucleotide
  Description of Combined DNA/RNA Molecule: Synthetic oligonucleotide
  siRNAs to PCSK9
  modified_base (1)..(1): 2'-hydroxy corresponding base
  modified_base (2)..(2): 2'-hydroxy corresponding base
  modified_base (3)..(3): 2'-hydroxy corresponding base
  modified_base (4)..(4): 2'-deoxy-2'-fluoro corresponding base
  modified_base (5)..(5): 2'-deoxy-2'-fluoro corresponding base
  modified_base (6)..(6): 2'-deoxy-2'-fluoro corresponding base
  modified_base (7)..(7): 2'-hydroxy corresponding base
  modified_base (8)..(8): 2'-deoxy-2'-fluoro corresponding base
  modified_base (9)..(9): 2'-hydroxy corresponding base
  modified_base (10)..(10): 2'-hydroxy corresponding base
  modified_base (11)..(11): 2'-hydroxy corresponding base
  modified_base (12)..(12): 2'-hydroxy corresponding base
  modified_base (13)..(13): 2'-hydroxy corresponding base
  modified_base (14)..(14): 2'-deoxy-2'-fluoro corresponding base
  modified_base (15)..(15): 2'-hydroxy corresponding base
  modified_base (16)..(16): 2'-deoxy-2'-fluoro corresponding base
  modified_base (17)..(17): 2'-deoxy-2'-fluoro corresponding base
  modified_base (18)..(18): 2'-hydroxy corresponding base
  modified_base (19)..(19): 2'-deoxy-2'-fluoro corresponding base
  modified_base (20)..(20): deoxythymidine
  modified_base (21)..(21): 5'-thio thymidine
aggccuaugagggugccgctt

SEQ ID NO: 745 - DNA, 21 bp, Artificial Sequence
  Description of Artificial Sequence: Synthetic oligonucleotide
  Description of Combined DNA/RNA Molecule: Synthetic oligonucleotide
  siRNAs to PCSK9
  modified_base (1)..(1): 2'-deoxy-2'-fluoro corresponding base
  modified_base (2)..(2): 2'-O-methyl corresponding base
  modified_base (3)..(3): 2'-deoxy-2'-fluoro corresponding base
  modified_base (4)..(4): 2'-O-methyl corresponding base
  modified_base (5)..(5): 2'-deoxy-2'-fluoro corresponding base
  modified_base (6)..(6): 2'-O-methyl corresponding base
  modified_base (7)..(7): 2'-deoxy-2'-fluoro corresponding base
  modified_base (8)..(8): 2'-O-methyl corresponding base
  modified_base (9)..(9): 2'-deoxy-2'-fluoro corresponding base
  modified_base (10)..(10): 2'-O-methyl corresponding base
  modified_base (11)..(11): 2'-deoxy-2'-fluoro corresponding base
  modified_base (12)..(12): 2'-O-methyl corresponding base
  modified_base (13)..(13): 2'-deoxy-2'-fluoro corresponding base
  modified_base (14)..(14): 2'-O-methyl corresponding base
  modified_base (15)..(15): 2'-deoxy-2'-fluoro corresponding base
  modified_base (16)..(16): 2'-O-methyl corresponding base
  modified_base (17)..(17): 2'-deoxy-2'-fluoro corresponding base
  modified_base (18)..(18): 2'-O-methyl corresponding base
  modified_base (19)..(19): 2'-deoxy-2'-fluoro corresponding base
  modified_base (20)..(20): deoxythymidine
  modified_base (21)..(21): 5'-thio thymidine
gcggcacccucauaggccutt

SEQ ID NO: 746 - DNA, 21 bp, Artificial Sequence
  Description of Artificial Sequence: Synthetic oligonucleotide
  Description of Combined DNA/RNA Molecule: Synthetic oligonucleotide
  siRNAs to PCSK9
  modified_base (1)..(1): 2'-hydroxy corresponding base
  modified_base (2)..(2): 2'-hydroxy corresponding base
  modified_base (3)..(3): 2'-hydroxy corresponding base
  modified_base (4)..(4): 2'-hydroxy corresponding base
  modified_base (5)..(5): 2'-hydroxy corresponding base
  modified_base (6)..(6): 2'-O-methyl corresponding base
  modified_base (7)..(7): 2'-O-methyl corresponding base
  modified_base (8)..(8): 2'-hydroxy corresponding base
  modified_base (9)..(9): 2'-hydroxy corresponding base
  modified_base (10)..(10): 2'-O-methyl corresponding base
  modified_base (11)..(11): 2'-O-methyl corresponding base
  modified_base (12)..(12): 2'-hydroxy corresponding base
  modified_base (13)..(13): 2'-hydroxy corresponding base
  modified_base (14)..(14): 2'-hydroxy corresponding base
  modified_base (15)..(15): 2'-hydroxy corresponding base
  modified_base (16)..(16): 2'-hydroxy corresponding base
  modified_base (17)..(17): 2'-O-methyl corresponding base
  modified_base (18)..(18): 2'-O-methyl corresponding base
  modified_base (19)..(19): 2'-O-methyl corresponding base
  modified_base (20)..(20): deoxythymidine
  modified_base (21)..(21): 5'-thio thymidine
aggccuaugagggugccgctt

SEQ ID NO: 747 - DNA, 21 bp, Artificial Sequence
  Description of Artificial Sequence: Synthetic oligonucleotide
  Description of Combined DNA/RNA Molecule: Synthetic oligonucleotide
  siRNAs to PCSK9
  modified_base (1)..(1): 2'-hydroxy corresponding base
  modified_base (2)..(2): 2'-deoxy-2'-fluoro corresponding base
  modified_base (3)..(3): 2'-hydroxy corresponding base
  modified_base (4)..(4): 2'-hydroxy corresponding base
  modified_base (5)..(5): 2'-deoxy-2'-fluoro corresponding base
  modified_base (6)..(6): 2'-hydroxy corresponding base
  modified_base (7)..(7): 2'-deoxy-2'-fluoro corresponding base
  modified_base (8)..(8): 2'-deoxy-2'-fluoro corresponding base
  modified_base (9)..(9): 2'-deoxy-2'-fluoro corresponding base
  modified_base (10)..(10): 2'-deoxy-2'-fluoro corresponding base
  modified_base (11)..(11): 2'-deoxy-2'-fluoro corresponding base
  modified_base (12)..(12): 2'-hydroxy corresponding base
  modified_base (13)..(13): 2'-deoxy-2'-fluoro corresponding base
  modified_base (14)..(14): 2'-hydroxy corresponding base
  modified_base (15)..(15): 2'-hydroxy corresponding base
  modified_base (16)..(16): 2'-hydroxy corresponding base
  modified_base (17)..(17): 2'-deoxy-2'-fluoro corresponding base
  modified_base (18)..(18): 2'-deoxy-2'-fluoro corresponding base
  modified_base (19)..(19): 2'-deoxy-2'-fluoro corresponding base
  modified_base (20)..(20): deoxythymidine
  modified_base (21)..(21): 5'-thio thymidine
gcggcacccucauaggccutt

SEQ ID NO: 748 - DNA, 21 bp, Artificial Sequence
  Description of Artificial Sequence: Synthetic oligonucleotide
  Description of Combined DNA/RNA Molecule: Synthetic oligonucleotide
  siRNAs to PCSK9
  modified_base (1)..(1): 2'-hydroxy corresponding base
  modified_base (2)..(2): 2'-hydroxy corresponding base
  modified_base (3)..(3): 2'-hydroxy corresponding base
  modified_base (4)..(4): 2'-hydroxy corresponding base
  modified_base (5)..(5): 2'-hydroxy corresponding base
  modified_base (6)..(6): 2'-O-methyl corresponding base
  modified_base (7)..(7): 2'-O-methyl corresponding base
  modified_base (8)..(8): 2'-hydroxy corresponding base
  modified_base (9)..(9): 2'-hydroxy corresponding base
  modified_base (10)..(10): 2'-O-methyl corresponding base
  modified_base (11)..(11): 2'-O-methyl corresponding base
  modified_base (12)..(12): 2'-hydroxy corresponding base
  modified_base (13)..(13): 2'-hydroxy corresponding base
  modified_base (14)..(14): 2'-hydroxy corresponding base
  modified_base (15)..(15): 2'-hydroxy corresponding base
  modified_base (16)..(16): 2'-hydroxy corresponding base
  modified_base (17)..(17): 2'-O-methyl corresponding base
  modified_base (18)..(18): 2'-O-methyl corresponding base
  modified_base (19)..(19): 2'-O-methyl corresponding base
  modified_base (20)..(20): deoxythymidine
  modified_base (21)..(21): 5'-thio thymidine
aggccuaugagggugccgctt

SEQ ID NO: 749 - DNA, 21 bp, Artificial Sequence
  Description of Artificial Sequence: Synthetic oligonucleotide
  Description of Combined DNA/RNA Molecule: Synthetic oligonucleotide
  siRNAs to PCSK9
  modified_base (1)..(1): 2'-hydroxy corresponding base
  modified_base (2)..(2): 2'-O-methyl corresponding base
  modified_base (3)..(3): 2'-hydroxy corresponding base
  modified_base (4)..(4): 2'-O-methyl corresponding base
  modified_base (5)..(5): 2'-hydroxy corresponding base
  modified_base (6)..(6): 2'-O-methyl corresponding base
  modified_base (7)..(7): 2'-hydroxy corresponding base
  modified_base (8)..(8): 2'-O-methyl corresponding base
  modified_base (9)..(9): 2'-hydroxy corresponding base
  modified_base (10)..(10): 2'-O-methyl corresponding base
  modified_base (11)..(11): 2'-hydroxy corresponding base
  modified_base (12)..(12): 2'-O-methyl corresponding base
  modified_base (13)..(13): 2'-hydroxy corresponding base
  modified_base (14)..(14): 2'-O-methyl corresponding base
  modified_base (15)..(15): 2'-hydroxy corresponding base
  modified_base (16)..(16): 2'-O-methyl corresponding base
  modified_base (17)..(17): 2'-hydroxy corresponding base
  modified_base (18)..(18): 2'-O-methyl corresponding base
  modified_base (19)..(19): 2'-hydroxy corresponding base
  modified_base (20)..(20): deoxythymidine
  modified_base (21)..(21): 5'-thio thymidine
gcggcacccucauaggccutt

SEQ ID NO: 750 - DNA, 21 bp, Artificial Sequence
  Description of Artificial Sequence: Synthetic oligonucleotide
  Description of Combined DNA/RNA Molecule: Synthetic oligonucleotide
  siRNAs to PCSK9
  modified_base (1)..(1): 2'-hydroxy corresponding base
  modified_base (2)..(2): 2'-hydroxy corresponding base
  modified_base (3)..(3): 2'-hydroxy corresponding base
  modified_base (4)..(4): 2'-hydroxy corresponding base
  modified_base (5)..(5): 2'-hydroxy corresponding base
  modified_base (6)..(6): 2'-O-methyl corresponding base
  modified_base (7)..(7): 2'-O-methyl corresponding base
  modified_base (8)..(8): 2'-hydroxy corresponding base
  modified_base (9)..(9): 2'-hydroxy corresponding base
  modified_base (10)..(10): 2'-O-methyl corresponding base
  modified_base (11)..(11): 2'-O-methyl corresponding base
  modified_base (12)..(12): 2'-hydroxy corresponding base
  modified_base (13)..(13): 2'-hydroxy corresponding base
  modified_base (14)..(14): 2'-hydroxy corresponding base
  modified_base (15)..(15): 2'-hydroxy corresponding base
  modified_base (16)..(16): 2'-hydroxy corresponding base
  modified_base (17)..(17): 2'-O-methyl corresponding base
  modified_base (18)..(18): 2'-O-methyl corresponding base
  modified_base (19)..(19): 2'-O-methyl corresponding base
  modified_base (20)..(20): deoxythymidine
  modified_base (21)..(21): 5'-thio thymidine
aggccuaugagggugccgctt

SEQ ID NO: 751 - DNA, 21 bp, Artificial Sequence
  Description of Artificial Sequence: Synthetic oligonucleotide
  Description of Combined DNA/RNA Molecule: Synthetic oligonucleotide
  siRNAs to PCSK9
  modified_base (1)..(1): 2'-hydroxy corresponding base
  modified_base (2)..(2): 2'-hydroxy corresponding base
  modified_base (3)..(3): 2'-hydroxy corresponding base
  modified_base (4)..(4): 2'-hydroxy corresponding base
  modified_base (5)..(5): 2'-hydroxy corresponding base
  modified_base (6)..(6): 2'-hydroxy corresponding base
  modified_base (7)..(7): 2'-hydroxy corresponding base
  modified_base (8)..(8): 2'-hydroxy corresponding base
  modified_base (9)..(9): 2'-hydroxy corresponding base
  modified_base (10)..(10): 2'-hydroxy corresponding base
  modified_base (11)..(11): 2'-hydroxy corresponding base
  modified_base (12)..(12): 2'-hydroxy corresponding base
  modified_base (13)..(13): 2'-hydroxy corresponding base
  modified_base (14)..(14): 2'-hydroxy corresponding base
  modified_base (15)..(15): 2'-hydroxy corresponding base
  modified_base (16)..(16): 2'-hydroxy corresponding base
  modified_base (17)..(17): 2'-hydroxy corresponding base
  modified_base (18)..(18): 2'-hydroxy corresponding base
  modified_base (19)..(19): 2'-hydroxy corresponding base
  modified_base (20)..(20): deoxythymidine
  modified_base (21)..(21): 5'-thio thymidine
aaggagcauggaaucccggtt

SEQ ID NO: 752 - DNA, 21 bp, Artificial Sequence
  Description of Artificial Sequence: Synthetic oligonucleotide
  Description of Combined DNA/RNA Molecule: Synthetic oligonucleotide
  siRNAs to PCSK9
  modified_base (1)..(1): 2'-hydroxy corresponding base
  modified_base (2)..(2): 2'-hydroxy corresponding base
  modified_base (3)..(3): 2'-hydroxy corresponding base
  modified_base (4)..(4): 2'-hydroxy corresponding base
  modified_base (5)..(5): 2'-hydroxy corresponding base
  modified_base (6)..(6): 2'-hydroxy corresponding base
  modified_base (7)..(7): 2'-hydroxy corresponding base
  modified_base (8)..(8): 2'-hydroxy corresponding base
  modified_base (9)..(9): 2'-hydroxy corresponding base
  modified_base (10)..(10): 2'-hydroxy corresponding base
  modified_base (11)..(11): 2'-hydroxy corresponding base
  modified_base (12)..(12): 2'-hydroxy corresponding base
  modified_base (13)..(13): 2'-hydroxy corresponding base
  modified_base (14)..(14): 2'-hydroxy corresponding base
  modified_base (15)..(15): 2'-hydroxy corresponding base
  modified_base (16)..(16): 2'-hydroxy corresponding base
  modified_base (17)..(17): 2'-hydroxy corresponding base
  modified_base (18)..(18): 2'-hydroxy corresponding base
  modified_base (19)..(19): 2'-hydroxy corresponding base
  modified_base (20)..(20): deoxythymidine
  modified_base (21)..(21): 5'-thio thymidine
ccgggauuccaugcuccuutt

SEQ ID NO: 753 - DNA, 21 bp, Artificial Sequence
  Description of Artificial Sequence: Synthetic oligonucleotide
  Description of Combined DNA/RNA Molecule: Synthetic oligonucleotide
  siRNAs to PCSK9
  modified_base (1)..(1): 2'-hydroxy corresponding base
  modified_base (2)..(2): 2'-hydroxy corresponding base
  modified_base (3)..(3): 2'-hydroxy corresponding base
  modified_base (4)..(4): 2'-hydroxy corresponding base
  modified_base (5)..(5): 2'-hydroxy corresponding base
  modified_base (6)..(6): 2'-hydroxy corresponding base
  modified_base (7)..(7): 2'-O-methyl corresponding base
  modified_base (8)..(8): 2'-hydroxy corresponding base
  modified_base (9)..(9): 2'-O-methyl corresponding base
  modified_base (10)..(10): 2'-hydroxy corresponding base
  modified_base (11)..(11): 2'-hydroxy corresponding base
  modified_base (12)..(12): 2'-hydroxy corresponding base
  modified_base (13)..(13): 2'-hydroxy corresponding base
  modified_base (14)..(14): 2'-O-methyl corresponding base
  modified_base (15)..(15): 2'-O-methyl corresponding base
  modified_base (16)..(16): 2'-O-methyl corresponding base
  modified_base (17)..(17): 2'-O-methyl corresponding base
  modified_base (18)..(18): 2'-hydroxy corresponding base
  modified_base (19)..(19): 2'-hydroxy corresponding base
  modified_base (20)..(20): deoxythymidine
  modified_base (21)..(21): 5'-thio thymidine
aaggagcauggaaucccggtt

SEQ ID NO: 754 - DNA, 21 bp, Artificial Sequence
  Description of Artificial Sequence: Synthetic oligonucleotide
  Description of Combined DNA/RNA Molecule: Synthetic oligonucleotide
  siRNAs to PCSK9
  modified_base (1)..(1): 2'-hydroxy corresponding base
  modified_base (2)..(2): 2'-hydroxy corresponding base
  modified_base (3)..(3): 2'-hydroxy corresponding base
  modified_base (4)..(4): 2'-hydroxy corresponding base
  modified_base (5)..(5): 2'-hydroxy corresponding base
  modified_base (6)..(6): 2'-hydroxy corresponding base
  modified_base (7)..(7): 2'-hydroxy corresponding base
  modified_base (8)..(8): 2'-hydroxy corresponding base
  modified_base (9)..(9): 2'-hydroxy corresponding base
  modified_base (10)..(10): 2'-O-methyl corresponding base
  modified_base (11)..(11): 2'-hydroxy corresponding base
  modified_base (12)..(12): 2'-hydroxy corresponding base
  modified_base (13)..(13): 2'-hydroxy corresponding base
  modified_base (14)..(14): 2'-hydroxy corresponding base
  modified_base (15)..(15): 2'-hydroxy corresponding base
  modified_base (16)..(16): 2'-hydroxy corresponding base
  modified_base (17)..(17): 2'-hydroxy corresponding base
  modified_base (18)..(18): 2'-hydroxy corresponding base
  modified_base (19)..(19): 2'-hydroxy corresponding base
  modified_base (20)..(20): deoxythymidine
  modified_base (21)..(21): 5'-thio thymidine
ccgggauuccaugcuccuutt

SEQ ID NO: 755 - DNA, 21 bp, Artificial Sequence
  Description of Artificial Sequence: Synthetic oligonucleotide
  Description of Combined DNA/RNA Molecule: Synthetic oligonucleotide
  siRNAs to PCSK9
  modified_base (1)..(1): 2'-hydroxy corresponding base
  modified_base (2)..(2): 2'-hydroxy corresponding base
  modified_base (3)..(3): 2'-hydroxy corresponding base
  modified_base (4)..(4): 2'-hydroxy corresponding base
  modified_base (5)..(5): 2'-hydroxy corresponding base
  modified_base (6)..(6): 2'-hydroxy corresponding base
  modified_base (7)..(7): 2'-hydroxy corresponding base
  modified_base (8)..(8): 2'-hydroxy corresponding base
  modified_base (9)..(9): 2'-hydroxy corresponding base
  modified_base (10)..(10): 2'-hydroxy corresponding base
  modified_base (11)..(11): 2'-hydroxy corresponding base
  modified_base (12)..(12): 2'-hydroxy corresponding base
  modified_base (13)..(13): 2'-hydroxy corresponding base
  modified_base (14)..(14): 2'-hydroxy corresponding base
  modified_base (15)..(15): 2'-hydroxy corresponding base
  modified_base (16)..(16): 2'-hydroxy corresponding base
  modified_base (17)..(17): 2'-hydroxy corresponding base
  modified_base (18)..(18): 2'-hydroxy corresponding base
  modified_base (19)..(19): 2'-hydroxy corresponding base
  modified_base (20)..(20): deoxythymidine
  modified_base (21)..(21): 5'-thio thymidine
aggagcauggaaucccggctt

SEQ ID NO: 756 - DNA, 21 bp, Artificial Sequence
  Description of Artificial Sequence: Synthetic oligonucleotide
  Description of Combined DNA/RNA Molecule: Synthetic oligonucleotide
  siRNAs to PCSK9
  modified_base (1)..(1): 2'-hydroxy corresponding base
  modified_base (2)..(2): 2'-hydroxy corresponding base
  modified_base (3)..(3): 2'-hydroxy corresponding base
  modified_base (4)..(4): 2'-hydroxy corresponding base
  modified_base (5)..(5): 2'-hydroxy corresponding base
  modified_base (6)..(6): 2'-hydroxy corresponding base
  modified_base (7)..(7): 2'-hydroxy corresponding base
  modified_base (8)..(8): 2'-hydroxy corresponding base
  modified_base (9)..(9): 2'-hydroxy corresponding base
  modified_base (10)..(10): 2'-hydroxy corresponding base
  modified_base (11)..(11): 2'-hydroxy corresponding base
  modified_base (12)..(12): 2'-hydroxy corresponding base
  modified_base (13)..(13): 2'-hydroxy corresponding base
  modified_base (14)..(14): 2'-hydroxy corresponding base
  modified_base (15)..(15): 2'-hydroxy corresponding base
  modified_base (16)..(16): 2'-hydroxy corresponding base
  modified_base (17)..(17): 2'-hydroxy corresponding base
  modified_base (18)..(18): 2'-hydroxy corresponding base
  modified_base (19)..(19): 2'-hydroxy corresponding base
  modified_base (20)..(20): deoxythymidine
  modified_base (21)..(21): 5'-thio thymidine
gccgggauuccaugcuccutt

SEQ ID NO: 757 - DNA, 21 bp, Artificial Sequence
  Description of Artificial Sequence: Synthetic oligonucleotide
  Description of Combined DNA/RNA Molecule: Synthetic oligonucleotide
  siRNAs to PCSK9
  modified_base (1)..(1): 2'-hydroxy corresponding base
  modified_base (2)..(2): 2'-hydroxy corresponding base
  modified_base (3)..(3): 2'-hydroxy corresponding base
  modified_base (4)..(4): 2'-hydroxy corresponding base
  modified_base (5)..(5): 2'-hydroxy corresponding base
  modified_base (6)..(6): 2'-O-methyl corresponding base
  modified_base (7)..(7): 2'-hydroxy corresponding base
  modified_base (8)..(8): 2'-O-methyl corresponding base
  modified_base (9)..(9): 2'-hydroxy corresponding base
  modified_base (10)..(10): 2'-hydroxy corresponding base
  modified_base (11)..(11): 2'-hydroxy corresponding base
  modified_base (12)..(12): 2'-hydroxy corresponding base
  modified_base (13)..(13): 2'-O-methyl corresponding base
  modified_base (14)..(14): 2'-O-methyl corresponding base
  modified_base (15)..(15): 2'-O-methyl corresponding base
  modified_base (16)..(16): 2'-O-methyl corresponding base
  modified_base (17)..(17): 2'-hydroxy corresponding base
  modified_base (18)..(18): 2'-hydroxy corresponding base
  modified_base (19)..(19): 2'-O-methyl corresponding base
  modified_base (20)..(20): deoxythymidine
  modified_base (21)..(21): 5'-thio thymidine
aggagcauggaaucccggctt

SEQ ID NO: 758 - DNA, 21 bp, Artificial Sequence
  Description of Artificial Sequence: Synthetic oligonucleotide
  Description of Combined DNA/RNA Molecule: Synthetic oligonucleotide
  siRNAs to PCSK9
  modified_base (1)..(1): 2'-hydroxy corresponding base
  modified_base (2)..(2): 2'-hydroxy corresponding base
  modified_base (3)..(3): 2'-hydroxy corresponding base
  modified_base (4)..(4): 2'-hydroxy corresponding base
  modified_base (5)..(5): 2'-hydroxy corresponding base
  modified_base (6)..(6): 2'-hydroxy corresponding base
  modified_base (7)..(7): 2'-hydroxy corresponding base
  modified_base (8)..(8): 2'-hydroxy corresponding base
  modified_base (9)..(9): 2'-hydroxy corresponding base
  modified_base (10)..(10): 2'-hydroxy corresponding base
  modified_base (11)..(11): 2'-O-methyl corresponding base
  modified_base (12)..(12): 2'-hydroxy corresponding base
  modified_base (13)..(13): 2'-hydroxy corresponding base
  modified_base (14)..(14): 2'-hydroxy corresponding base
  modified_base (15)..(15): 2'-hydroxy corresponding base
  modified_base (16)..(16): 2'-hydroxy corresponding base
  modified_base (17)..(17): 2'-hydroxy corresponding base
  modified_base (18)..(18): 2'-hydroxy corresponding base
  modified_base (19)..(19): 2'-hydroxy corresponding base
  modified_base (20)..(20): deoxythymidine
  modified_base (21)..(21): 5'-thio thymidine
gccgggauuccaugcuccutt

SEQ ID NO: 759 - DNA, 21 bp, Artificial Sequence
  Description of Artificial Sequence: Synthetic oligonucleotide
  Description of Combined DNA/RNA Molecule: Synthetic oligonucleotide
  siRNAs to PCSK9
  modified_base (1)..(1): 2'-hydroxy corresponding base
  modified_base (2)..(2): 2'-hydroxy corresponding base
  modified_base (3)..(3): 2'-hydroxy corresponding base
  modified_base (4)..(4): 2'-hydroxy corresponding base
  modified_base (5)..(5): 2'-hydroxy corresponding base
  modified_base (6)..(6): 2'-hydroxy corresponding base
  modified_base (7)..(7): 2'-hydroxy corresponding base
  modified_base (8)..(8): 2'-hydroxy corresponding base
  modified_base (9)..(9): 2'-hydroxy corresponding base
  modified_base (10)..(10): 2'-hydroxy corresponding base
  modified_base (11)..(11): 2'-hydroxy corresponding base
  modified_base (12)..(12): 2'-hydroxy corresponding base
  modified_base (13)..(13): 2'-hydroxy corresponding base
  modified_base (14)..(14): 2'-hydroxy corresponding base
  modified_base (15)..(15): 2'-hydroxy corresponding base
  modified_base (16)..(16): 2'-hydroxy corresponding base
  modified_base (17)..(17): 2'-hydroxy corresponding base
  modified_base (18)..(18): 2'-hydroxy corresponding base
  modified_base (19)..(19): 2'-hydroxy corresponding base
  modified_base (20)..(20): deoxythymidine
  modified_base (21)..(21): 5'-thio thymidine
gagcauggaaucccggccctt

SEQ ID NO: 760 - DNA, 21 bp, Artificial Sequence
  Description of Artificial Sequence: Synthetic oligonucleotide
  Description of Combined DNA/RNA Molecule: Synthetic oligonucleotide
  siRNAs to PCSK9
  modified_base (1)..(1): 2'-hydroxy corresponding base
  modified_base (2)..(2): 2'-hydroxy corresponding base
  modified_base (3)..(3): 2'-hydroxy corresponding base
  modified_base (4)..(4): 2'-hydroxy corresponding base
  modified_base (5)..(5): 2'-hydroxy corresponding base
  modified_base (6)..(6): 2'-hydroxy corresponding base
  modified_base (7)..(7): 2'-hydroxy corresponding base
  modified_base (8)..(8): 2'-hydroxy corresponding base
  modified_base (9)..(9): 2'-hydroxy corresponding base
  modified_base (10)..(10): 2'-hydroxy corresponding base
  modified_base (11)..(11): 2'-hydroxy corresponding base
  modified_base (12)..(12): 2'-hydroxy corresponding base
  modified_base (13)..(13): 2'-hydroxy corresponding base
  modified_base (14)..(14): 2'-hydroxy corresponding base
  modified_base (15)..(15): 2'-hydroxy corresponding base
  modified_base (16)..(16): 2'-hydroxy corresponding base
  modified_base (17)..(17): 2'-hydroxy corresponding base
  modified_base (18)..(18): 2'-hydroxy corresponding base
  modified_base (19)..(19): 2'-hydroxy corresponding base
  modified_base (20)..(20): deoxythymidine
  modified_base (21)..(21): 5'-thio thymidine
gggccgggauuccaugcuctt

SEQ ID NO: 761 - DNA, 21 bp, Artificial Sequence
  Description of Artificial Sequence: Synthetic oligonucleotide
  Description of Combined DNA/RNA Molecule: Synthetic oligonucleotide
  siRNAs to PCSK9
  modified_base (1)..(1): 2'-hydroxy corresponding base
  modified_base (2)..(2): 2'-hydroxy corresponding base
  modified_base (3)..(3): 2'-hydroxy corresponding base
  modified_base (4)..(4): 2'-O-methyl corresponding base
  modified_base (5)..(5): 2'-hydroxy corresponding base
  modified_base (6)..(6): 2'-O-methyl corresponding base
  modified_base (7)..(7): 2'-hydroxy corresponding base
  modified_base (8)..(8): 2'-hydroxy corresponding base
  modified_base (9)..(9): 2'-hydroxy corresponding base
  modified_base (10)..(10): 2'-hydroxy corresponding base
  modified_base (11)..(11): 2'-O-methyl corresponding base
  modified_base (12)..(12): 2'-O-methyl corresponding base
  modified_base (13)..(13): 2'-O-methyl corresponding base
  modified_base (14)..(14): 2'-O-methyl corresponding base
  modified_base (15)..(15): 2'-hydroxy corresponding base
  modified_base (16)..(16): 2'-hydroxy corresponding base
  modified_base (17)..(17): 2'-O-methyl corresponding base
  modified_base (18)..(18): 2'-O-methyl corresponding base
  modified_base (19)..(19): 2'-O-methyl corresponding base
  modified_base (20)..(20): deoxythymidine
  modified_base (21)..(21): 5'-thio thymidine
gagcauggaaucccggccctt

SEQ ID NO: 762 - DNA, 21 bp, Artificial Sequence
  Description of Artificial Sequence: Synthetic oligonucleotide
  Description of Combined DNA/RNA Molecule: Synthetic oligonucleotide
  siRNAs to PCSK9
  modified_base (1)..(1): 2'-hydroxy corresponding base
  modified_base (2)..(2): 2'-hydroxy corresponding base
  modified_base (3)..(3): 2'-hydroxy corresponding base
  modified_base (4)..(4): 2'-hydroxy corresponding base
  modified_base (5)..(5): 2'-hydroxy corresponding base
  modified_base (6)..(6): 2'-hydroxy corresponding base
  modified_base (7)..(7): 2'-hydroxy corresponding base
  modified_base (8)..(8): 2'-hydroxy corresponding base
  modified_base (9)..(9): 2'-hydroxy corresponding base
  modified_base (10)..(10): 2'-hydroxy corresponding base
  modified_base (11)..(11): 2'-hydroxy corresponding base
  modified_base (12)..(12): 2'-hydroxy corresponding base
  modified_base (13)..(13): 2'-O-methyl corresponding base
  modified_base (14)..(14): 2'-hydroxy corresponding base
  modified_base (15)..(15): 2'-hydroxy corresponding base
  modified_base (16)..(16): 2'-hydroxy corresponding base
  modified_base (17)..(17): 2'-hydroxy corresponding base
  modified_base (18)..(18): 2'-hydroxy corresponding base
  modified_base (19)..(19): 2'-hydroxy corresponding base
  modified_base (20)..(20): deoxythymidine
  modified_base (21)..(21): 5'-thio thymidine
gggccgggauuccaugcuctt

SEQ ID NO: 763 - DNA, 21 bp, Artificial Sequence
  Description of Artificial Sequence: Synthetic oligonucleotide
  Description of Combined DNA/RNA Molecule: Synthetic oligonucleotide
  siRNAs to PCSK9
  modified_base (1)..(1): 2'-hydroxy corresponding base
  modified_base (2)..(2): 2'-hydroxy corresponding base
  modified_base (3)..(3): 2'-hydroxy corresponding base
  modified_base (4)..(4): 2'-hydroxy corresponding base
  modified_base (5)..(5): 2'-hydroxy corresponding base
  modified_base (6)..(6): 2'-hydroxy corresponding base
  modified_base (7)..(7): 2'-hydroxy corresponding base
  modified_base (8)..(8): 2'-hydroxy corresponding base
  modified_base (9)..(9): 2'-hydroxy corresponding base
  modified_base (10)..(10): 2'-hydroxy corresponding base
  modified_base (11)..(11): 2'-hydroxy corresponding base
  modified_base (12)..(12): 2'-hydroxy corresponding base
  modified_base (13)..(13): 2'-hydroxy corresponding base
  modified_base (14)..(14): 2'-hydroxy corresponding base
  modified_base (15)..(15): 2'-hydroxy corresponding base
  modified_base (16)..(16): 2'-hydroxy corresponding base
  modified_base (17)..(17): 2'-hydroxy corresponding base
  modified_base (18)..(18): 2'-hydroxy corresponding base
  modified_base (19)..(19): 2'-hydroxy corresponding base
  modified_base (20)..(20): deoxythymidine
  modified_base (21)..(21): deoxythymidine
gccuacgccguagacaacatt

SEQ ID NO: 764 - DNA, 21 bp, Artificial Sequence
  Description of Artificial Sequence: Synthetic oligonucleotide
  Description of Combined DNA/RNA Molecule: Synthetic oligonucleotide
  siRNAs to PCSK9
  modified_base (1)..(1): 2'-hydroxy corresponding base
  modified_base (2)..(2): 2'-hydroxy corresponding base
  modified_base (3)..(3): 2'-hydroxy corresponding base
  modified_base (4)..(4): 2'-hydroxy corresponding base
  modified_base (5)..(5): 2'-hydroxy corresponding base
  modified_base (6)..(6): 2'-hydroxy corresponding base
  modified_base (7)..(7): 2'-hydroxy corresponding base
  modified_base (8)..(8): 2'-hydroxy corresponding base
  modified_base (9)..(9): 2'-hydroxy corresponding base
  modified_base (10)..(10): 2'-hydroxy corresponding base
  modified_base (11)..(11): 2'-hydroxy corresponding base
  modified_base (12)..(12): 2'-hydroxy corresponding base
  modified_base (13)..(13): 2'-hydroxy corresponding base
  modified_base (14)..(14): 2'-hydroxy corresponding base
  modified_base (15)..(15): 2'-hydroxy corresponding base
  modified_base (16)..(16): 2'-hydroxy corresponding base
  modified_base (17)..(17): 2'-hydroxy corresponding base
  modified_base (18)..(18): 2'-hydroxy corresponding base
  modified_base (19)..(19): 2'-hydroxy corresponding base
  modified_base (20)..(20): deoxythymidine
  modified_base (21)..(21): deoxythymidine
uguugucuacggcguaggctt

SEQ ID NO: 765 - DNA, 21 bp, Artificial Sequence
  Description of Artificial Sequence: Synthetic oligonucleotide
  Description of Combined DNA/RNA Molecule: Synthetic oligonucleotide
  siRNAs to PCSK9
  modified_base (1)..(1): 2'-hydroxy corresponding base
  modified_base (2)..(2): 2'-hydroxy corresponding base
  modified_base (3)..(3): 2'-hydroxy corresponding base
  modified_base (4)..(4): 2'-hydroxy corresponding base
  modified_base (5)..(5): 2'-hydroxy corresponding base
  modified_base (6)..(6): 2'-hydroxy corresponding base
  modified_base (7)..(7): 2'-hydroxy corresponding base
  modified_base (8)..(8): 2'-hydroxy corresponding base
  modified_base (9)..(9): 2'-hydroxy corresponding base
  modified_base (10)..(10): 2'-hydroxy corresponding base
  modified_base (11)..(11): 2'-hydroxy corresponding base
  modified_base (12)..(12): 2'-hydroxy corresponding base
  modified_base (13)..(13): 2'-hydroxy corresponding base
  modified_base (14)..(14): 2'-hydroxy corresponding base
  modified_base (15)..(15): 2'-hydroxy corresponding base
  modified_base (16)..(16): 2'-hydroxy corresponding base
  modified_base (17)..(17): 2'-hydroxy corresponding base
  modified_base (18)..(18): 2'-hydroxy corresponding base
  modified_base (19)..(19): 2'-hydroxy corresponding base
  modified_base (20)..(20): deoxythymidine
  modified_base (21)..(21): deoxythymidine
ccuacgccguagacaacactt

SEQ ID NO: 766 - DNA, 21 bp, Artificial Sequence
  Description of Artificial Sequence: Synthetic oligonucleotide
  Description of Combined DNA/RNA Molecule: Synthetic oligonucleotide
  siRNAs to PCSK9
  modified_base (1)..(1): 2'-hydroxy corresponding base
  modified_base (2)..(2): 2'-hydroxy corresponding base
  modified_base (3)..(3): 2'-hydroxy corresponding base
  modified_base (4)..(4): 2'-hydroxy corresponding base
  modified_base (5)..(5): 2'-hydroxy corresponding base
  modified_base (6)..(6): 2'-hydroxy corresponding base
  modified_base (7)..(7): 2'-hydroxy corresponding base
  modified_base (8)..(8): 2'-hydroxy corresponding base
  modified_base (9)..(9): 2'-hydroxy corresponding base
  modified_base (10)..(10): 2'-hydroxy corresponding base
  modified_base (11)..(11): 2'-hydroxy corresponding base
  modified_base (12)..(12): 2'-hydroxy corresponding base
  modified_base (13)..(13): 2'-hydroxy corresponding base
  modified_base (14)..(14): 2'-hydroxy corresponding base
  modified_base (15)..(15): 2'-hydroxy corresponding base
  modified_base (16)..(16): 2'-hydroxy corresponding base
  modified_base (17)..(17): 2'-hydroxy corresponding base
  modified_base (18)..(18): 2'-hydroxy corresponding base
  modified_base (19)..(19): 2'-hydroxy corresponding base
  modified_base (20)..(20): deoxythymidine
  modified_base (21)..(21): deoxythymidine
guguugucuacggcguaggtt

SEQ ID NO: 767 - DNA, 21 bp, Artificial Sequence
  Description of Artificial Sequence: Synthetic oligonucleotide
  Description of Combined DNA/RNA Molecule: Synthetic oligonucleotide
  siRNAs to PCSK9
  modified_base (1)..(1): 2'-hydroxy corresponding base
  modified_base (2)..(2): 2'-hydroxy corresponding base
  modified_base (3)..(3): 2'-hydroxy corresponding base
  modified_base (4)..(4): 2'-hydroxy corresponding base
  modified_base (5)..(5): 2'-hydroxy corresponding base
  modified_base (6)..(6): 2'-hydroxy corresponding base
  modified_base (7)..(7): 2'-hydroxy corresponding base
  modified_base (8)..(8): 2'-hydroxy corresponding base
  modified_base (9)..(9): 2'-hydroxy corresponding base
  modified_base (10)..(10): 2'-hydroxy corresponding base
  modified_base (11)..(11): 2'-hydroxy corresponding base
  modified_base (12)..(12): 2'-hydroxy corresponding base
  modified_base (13)..(13): 2'-hydroxy corresponding base
  modified_base (14)..(14): 2'-hydroxy corresponding base
  modified_base (15)..(15): 2'-hydroxy corresponding base
  modified_base (16)..(16): 2'-hydroxy corresponding base
  modified_base (17)..(17): 2'-hydroxy corresponding base
  modified_base (18)..(18): 2'-hydroxy corresponding base
  modified_base (19)..(19): 2'-hydroxy corresponding base
  modified_base (20)..(20): deoxythymidine
  modified_base (21)..(21): deoxythymidine
cuacgccguagacaacacgtt

SEQ ID NO: 768 - DNA, 21 bp, Artificial Sequence
  Description of Artificial Sequence: Synthetic oligonucleotide
  Description of Combined DNA/RNA Molecule: Synthetic oligonucleotide
  siRNAs to PCSK9
  modified_base (1)..(1): 2'-hydroxy corresponding base
  modified_base (2)..(2): 2'-hydroxy corresponding base
  modified_base (3)..(3): 2'-hydroxy corresponding base
  modified_base (4)..(4): 2'-hydroxy corresponding base
  modified_base (5)..(5): 2'-hydroxy corresponding base
  modified_base (6)..(6): 2'-hydroxy corresponding base
  modified_base (7)..(7): 2'-hydroxy corresponding base
  modified_base (8)..(8): 2'-hydroxy corresponding base
  modified_base (9)..(9): 2'-hydroxy corresponding base
  modified_base (10)..(10): 2'-hydroxy corresponding base
  modified_base (11)..(11): 2'-hydroxy corresponding base
  modified_base (12)..(12): 2'-hydroxy corresponding base
  modified_base (13)..(13): 2'-hydroxy corresponding base
  modified_base (14)..(14): 2'-hydroxy corresponding base
  modified_base (15)..(15): 2'-hydroxy corresponding base
  modified_base (16)..(16): 2'-hydroxy corresponding base
  modified_base (17)..(17): 2'-hydroxy corresponding base
  modified_base (18)..(18): 2'-hydroxy corresponding base
  modified_base (19)..(19): 2'-hydroxy corresponding base
  modified_base (20)..(20): deoxythymidine
  modified_base (21)..(21): deoxythymidine
cguguugucuacggcguagtt

SEQ ID NO: 769 - DNA, 21 bp, Artificial Sequence
  Description of Artificial Sequence: Synthetic oligonucleotide
  Description of Combined DNA/RNA Molecule: Synthetic oligonucleotide
  siRNAs to PCSK9
  modified_base (1)..(1): 2'-hydroxy corresponding base
  modified_base (2)..(2): 2'-hydroxy corresponding base
  modified_base (3)..(3): 2'-hydroxy corresponding base
  modified_base (4)..(4): 2'-hydroxy corresponding base
  modified_base (5)..(5): 2'-hydroxy corresponding base
  modified_base (6)..(6): 2'-hydroxy corresponding base
  modified_base (7)..(7): 2'-hydroxy corresponding base
  modified_base (8)..(8): 2'-hydroxy corresponding base
  modified_base (9)..(9): 2'-hydroxy corresponding base
  modified_base (10)..(10): 2'-hydroxy corresponding base
  modified_base (11)..(11): 2'-hydroxy corresponding base
  modified_base (12)..(12): 2'-hydroxy corresponding base
  modified_base (13)..(13): 2'-hydroxy corresponding base
  modified_base (14)..(14): 2'-hydroxy corresponding base
  modified_base (15)..(15): 2'-hydroxy corresponding base
  modified_base (16)..(16): 2'-hydroxy corresponding base
  modified_base (17)..(17): 2'-hydroxy corresponding base
  modified_base (18)..(18): 2'-hydroxy corresponding base
  modified_base (19)..(19): 2'-hydroxy corresponding base
  modified_base (20)..(20): deoxythymidine
  modified_base (21)..(21): deoxythymidine
uacgccguagacaacacgutt

SEQ ID NO: 770 - DNA, 21 bp, Artificial Sequence
  Description of Artificial Sequence: Synthetic oligonucleotide
  Description of Combined DNA/RNA Molecule: Synthetic oligonucleotide
  siRNAs to PCSK9
  modified_base (1)..(1): 2'-hydroxy corresponding base
  modified_base (2)..(2): 2'-hydroxy corresponding base
  modified_base (3)..(3): 2'-hydroxy corresponding base
  modified_base (4)..(4): 2'-hydroxy corresponding base
  modified_base (5)..(5): 2'-hydroxy corresponding base
  modified_base (6)..(6): 2'-hydroxy corresponding base
  modified_base (7)..(7): 2'-hydroxy corresponding base
  modified_base (8)..(8): 2'-hydroxy corresponding base
  modified_base (9)..(9): 2'-hydroxy corresponding base
  modified_base (10)..(10): 2'-hydroxy corresponding base
  modified_base (11)..(11): 2'-hydroxy corresponding base
  modified_base (12)..(12): 2'-hydroxy corresponding base
  modified_base (13)..(13): 2'-hydroxy corresponding base
  modified_base (14)..(14): 2'-hydroxy corresponding base
  modified_base (15)..(15): 2'-hydroxy corresponding base
  modified_base (16)..(16): 2'-hydroxy corresponding base
  modified_base (17)..(17): 2'-hydroxy corresponding base
  modified_base (18)..(18): 2'-hydroxy corresponding base
  modified_base (19)..(19): 2'-hydroxy corresponding base
  modified_base (20)..(20): deoxythymidine
  modified_base (21)..(21): deoxythymidine
acguguugucuacggcguatt

SEQ ID NO: 771 - DNA, 21 bp, Artificial Sequence
  Description of Artificial Sequence: Synthetic oligonucleotide
  Description of Combined DNA/RNA Molecule: Synthetic oligonucleotide
  siRNAs to PCSK9
  modified_base (1)..(1): 2'-hydroxy corresponding base
  modified_base (2)..(2): 2'-hydroxy corresponding base
  modified_base (3)..(3): 2'-hydroxy corresponding base
  modified_base (4)..(4): 2'-hydroxy corresponding base
  modified_base (5)..(5): 2'-hydroxy corresponding base
  modified_base (6)..(6): 2'-hydroxy corresponding base
  modified_base (7)..(7): 2'-hydroxy corresponding base
  modified_base (8)..(8): 2'-hydroxy corresponding base
  modified_base (9)..(9): 2'-hydroxy corresponding base
  modified_base (10)..(10): 2'-hydroxy corresponding base
  modified_base (11)..(11): 2'-hydroxy corresponding base
  modified_base (12)..(12): 2'-hydroxy corresponding base
  modified_base (13)..(13): 2'-hydroxy corresponding base
  modified_base (14)..(14): 2'-hydroxy corresponding base
  modified_base (15)..(15): 2'-hydroxy corresponding base
  modified_base (16)..(16): 2'-hydroxy corresponding base
  modified_base (17)..(17): 2'-hydroxy corresponding base
  modified_base (18)..(18): 2'-hydroxy corresponding base
  modified_base (19)..(19): 2'-hydroxy corresponding base
  modified_base (20)..(20): deoxythymidine
  modified_base (21)..(21): deoxythymidine
cgccguagacaacacgugutt

SEQ ID NO: 772 - DNA, 21 bp, Artificial Sequence
  Description of Artificial Sequence: Synthetic oligonucleotide
  Description of Combined DNA/RNA Molecule: Synthetic oligonucleotide
  siRNAs to PCSK9
  modified_base (1)..(1): 2'-hydroxy corresponding base
  modified_base (2)..(2): 2'-hydroxy corresponding base
  modified_base (3)..(3): 2'-hydroxy corresponding base
  modified_base (4)..(4): 2'-hydroxy corresponding base
  modified_base (5)..(5): 2'-hydroxy corresponding base
  modified_base (6)..(6): 2'-hydroxy corresponding base
  modified_base (7)..(7): 2'-hydroxy corresponding base
  modified_base (8)..(8): 2'-hydroxy corresponding base
  modified_base (9)..(9): 2'-hydroxy corresponding base
  modified_base (10)..(10): 2'-hydroxy corresponding base
  modified_base (11)..(11): 2'-hydroxy corresponding base
  modified_base (12)..(12): 2'-hydroxy corresponding base
  modified_base (13)..(13): 2'-hydroxy corresponding base
  modified_base (14)..(14): 2'-hydroxy corresponding base
  modified_base (15)..(15): 2'-hydroxy corresponding base
  modified_base (16)..(16): 2'-hydroxy corresponding base
  modified_base (17)..(17): 2'-hydroxy corresponding base
  modified_base (18)..(18): 2'-hydroxy corresponding base
  modified_base (19)..(19): 2'-hydroxy corresponding base
  modified_base (20)..(20): deoxythymidine
  modified_base (21)..(21): deoxythymidine
acacguguugucuacggcgtt

SEQ ID NO: 773 - DNA, 21 bp, Artificial Sequence
  Description of Artificial Sequence: Synthetic oligonucleotide
  Description of Combined DNA/RNA Molecule: Synthetic oligonucleotide
  siRNAs to PCSK9
  modified_base (1)..(1): 2'-hydroxy corresponding base
  modified_base (2)..(2): 2'-hydroxy corresponding base
  modified_base (3)..(3): 2'-hydroxy corresponding base
  modified_base (4)..(4): 2'-hydroxy corresponding base
  modified_base (5)..(5): 2'-hydroxy corresponding base
  modified_base (6)..(6): 2'-hydroxy corresponding base
  modified_base (7)..(7): 2'-hydroxy corresponding base
  modified_base (8)..(8): 2'-hydroxy corresponding base
  modified_base (9)..(9): 2'-hydroxy corresponding base
  modified_base (10)..(10): 2'-hydroxy corresponding base
  modified_base (11)..(11): 2'-hydroxy corresponding base
  modified_base (12)..(12): 2'-hydroxy corresponding base
  modified_base (13)..(13): 2'-hydroxy corresponding base
  modified_base (14)..(14): 2'-hydroxy corresponding base
  modified_base (15)..(15): 2'-hydroxy corresponding base
  modified_base (16)..(16): 2'-hydroxy corresponding base
  modified_base (17)..(17): 2'-hydroxy corresponding base
  modified_base (18)..(18): 2'-hydroxy corresponding base
  modified_base (19)..(19): 2'-hydroxy corresponding base
  modified_base (20)..(20): deoxythymidine
  modified_base (21)..(21): deoxythymidine
gccguagacaacacgugugtt

SEQ ID NO: 774 - DNA, 21 bp, Artificial Sequence
  Description of Artificial Sequence: Synthetic oligonucleotide
  Description of Combined DNA/RNA Molecule: Synthetic oligonucleotide
  siRNAs to PCSK9
  modified_base (1)..(1): 2'-hydroxy corresponding base
  modified_base (2)..(2): 2'-hydroxy corresponding base
  modified_base (3)..(3): 2'-hydroxy corresponding base
  modified_base (4)..(4): 2'-hydroxy corresponding base
  modified_base (5)..(5): 2'-hydroxy corresponding base
  modified_base (6)..(6): 2'-hydroxy corresponding base
  modified_base (7)..(7): 2'-hydroxy corresponding base
  modified_base (8)..(8): 2'-hydroxy corresponding base
  modified_base (9)..(9): 2'-hydroxy corresponding base
  modified_base (10)..(10): 2'-hydroxy corresponding base
  modified_base (11)..(11): 2'-hydroxy corresponding base
  modified_base (12)..(12): 2'-hydroxy corresponding base
  modified_base (13)..(13): 2'-hydroxy corresponding base
  modified_base (14)..(14): 2'-hydroxy corresponding base
  modified_base (15)..(15): 2'-hydroxy corresponding base
  modified_base (16)..(16): 2'-hydroxy corresponding base
  modified_base (17)..(17): 2'-hydroxy corresponding base
  modified_base (18)..(18): 2'-hydroxy corresponding base
  modified_base (19)..(19): 2'-hydroxy corresponding base
  modified_base (20)..(20): deoxythymidine
  modified_base (21)..(21): deoxythymidine
cacacguguugucuacggctt

SEQ ID NO: 775 - DNA, 21 bp, Artificial Sequence
  Description of Artificial Sequence: Synthetic oligonucleotide
  Description of Combined DNA/RNA Molecule: Synthetic oligonucleotide
  siRNAs to PCSK9
  modified_base (1)..(1): 2'-hydroxy corresponding base
  modified_base (2)..(2): 2'-hydroxy corresponding base
  modified_base (3)..(3): 2'-hydroxy corresponding base
  modified_base (4)..(4): 2'-hydroxy corresponding base
  modified_base (5)..(5): 2'-hydroxy corresponding base
  modified_base (6)..(6): 2'-hydroxy corresponding base
  modified_base (7)..(7): 2'-hydroxy corresponding base
  modified_base (8)..(8): 2'-hydroxy corresponding base
  modified_base (9)..(9): 2'-hydroxy corresponding base
  modified_base (10)..(10): 2'-hydroxy corresponding base
  modified_base (11)..(11): 2'-hydroxy corresponding base
  modified_base (12)..(12): 2'-hydroxy corresponding base
  modified_base (13)..(13): 2'-hydroxy corresponding base
  modified_base (14)..(14): 2'-hydroxy corresponding base
  modified_base (15)..(15): 2'-hydroxy corresponding base
  modified_base (16)..(16): 2'-hydroxy corresponding base
  modified_base (17)..(17): 2'-hydroxy corresponding base
  modified_base (18)..(18): 2'-hydroxy corresponding base
  modified_base (19)..(19): 2'-hydroxy corresponding base
  modified_base (20)..(20): deoxythymidine
  modified_base (21)..(21): deoxythymidine
ccguagacaacacgugugutt

SEQ ID NO: 776 - DNA, 21 bp, Artificial Sequence
  Description of Artificial Sequence: Synthetic oligonucleotide
  Description of Combined DNA/RNA Molecule: Synthetic oligonucleotide
  siRNAs to PCSK9
  modified_base (1)..(1): 2'-hydroxy corresponding base
  modified_base (2)..(2): 2'-hydroxy corresponding base
  modified_base (3)..(3): 2'-hydroxy corresponding base
  modified_base (4)..(4): 2'-hydroxy corresponding base
  modified_base (5)..(5): 2'-hydroxy corresponding base
  modified_base (6)..(6): 2'-hydroxy corresponding base
  modified_base (7)..(7): 2'-hydroxy corresponding base
  modified_base (8)..(8): 2'-hydroxy corresponding base
  modified_base (9)..(9): 2'-hydroxy corresponding base
  modified_base (10)..(10): 2'-hydroxy corresponding base
  modified_base (11)..(11): 2'-hydroxy corresponding base
  modified_base (12)..(12): 2'-hydroxy corresponding base
  modified_base (13)..(13): 2'-hydroxy corresponding base
  modified_base (14)..(14): 2'-hydroxy corresponding base
  modified_base (15)..(15): 2'-hydroxy corresponding base
  modified_base (16)..(16): 2'-hydroxy corresponding base
  modified_base (17)..(17): 2'-hydroxy corresponding base
  modified_base (18)..(18): 2'-hydroxy corresponding base
  modified_base (19)..(19): 2'-hydroxy corresponding base
  modified_base (20)..(20): deoxythymidine
  modified_base (21)..(21): deoxythymidine
acacacguguugucuacggtt

SEQ ID NO: 777 - DNA, 21 bp, Artificial Sequence
  Description of Artificial Sequence: Synthetic oligonucleotide
  Description of Combined DNA/RNA Molecule: Synthetic oligonucleotide
  siRNAs to PCSK9
  modified_base (1)..(1): 2'-hydroxy corresponding base
  modified_base (2)..(2): 2'-hydroxy corresponding base
  modified_base (3)..(3): 2'-hydroxy corresponding base
  modified_base (4)..(4): 2'-hydroxy corresponding base
  modified_base (5)..(5): 2'-hydroxy corresponding base
  modified_base (6)..(6): 2'-hydroxy corresponding base
  modified_base (7)..(7): 2'-hydroxy corresponding base
  modified_base (8)..(8): 2'-hydroxy corresponding base
  modified_base (9)..(9): 2'-hydroxy corresponding base
  modified_base (10)..(10): 2'-hydroxy corresponding base
  modified_base (11)..(11): 2'-hydroxy corresponding base
  modified_base (12)..(12): 2'-hydroxy corresponding base
  modified_base (13)..(13): 2'-hydroxy corresponding base
  modified_base (14)..(14): 2'-hydroxy corresponding base
  modified_base (15)..(15): 2'-hydroxy corresponding base
  modified_base (16)..(16): 2'-hydroxy corresponding base
  modified_base (17)..(17): 2'-hydroxy corresponding base
  modified_base (18)..(18): 2'-hydroxy corresponding base
  modified_base (19)..(19): 2'-hydroxy corresponding base
  modified_base (20)..(20): deoxythymidine
  modified_base (21)..(21): deoxythymidine
cguagacaacacguguguatt

SEQ ID NO: 778 - DNA, 21 bp, Artificial Sequence
  Description of Artificial Sequence: Synthetic oligonucleotide
  Description of Combined DNA/RNA Molecule: Synthetic oligonucleotide
  siRNAs to PCSK9
  modified_base (1)..(1): 2'-hydroxy corresponding base
  modified_base (2)..(2): 2'-hydroxy corresponding base
  modified_base (3)..(3): 2'-hydroxy corresponding base
  modified_base (4)..(4): 2'-hydroxy corresponding base
  modified_base (5)..(5): 2'-hydroxy corresponding base
  modified_base (6)..(6): 2'-hydroxy corresponding base
  modified_base (7)..(7): 2'-hydroxy corresponding base
  modified_base (8)..(8): 2'-hydroxy corresponding base
  modified_base (9)..(9): 2'-hydroxy corresponding base
  modified_base (10)..(10): 2'-hydroxy corresponding base
  modified_base (11)..(11): 2'-hydroxy corresponding base
  modified_base (12)..(12): 2'-hydroxy corresponding base
  modified_base (13)..(13): 2'-hydroxy corresponding base
  modified_base (14)..(14): 2'-hydroxy corresponding base
  modified_base (15)..(15): 2'-hydroxy corresponding base
  modified_base (16)..(16): 2'-hydroxy corresponding base
  modified_base (17)..(17): 2'-hydroxy corresponding base
  modified_base (18)..(18): 2'-hydroxy corresponding base
  modified_base (19)..(19): 2'-hydroxy corresponding base
  modified_base (20)..(20): deoxythymidine
  modified_base (21)..(21): deoxythymidine
uacacacguguugucuacgtt

SEQ ID NO: 779 - DNA, 21 bp, Artificial Sequence
  Description of Artificial Sequence: Synthetic oligonucleotide
  Description of Combined DNA/RNA Molecule: Synthetic oligonucleotide
  siRNAs to PCSK9
  modified_base (1)..(1): 2'-hydroxy corresponding base
  modified_base (2)..(2): 2'-hydroxy corresponding base
  modified_base (3)..(3): 2'-hydroxy corresponding base
  modified_base (4)..(4): 2'-hydroxy corresponding base
  modified_base (5)..(5): 2'-hydroxy corresponding base
  modified_base (6)..(6): 2'-hydroxy corresponding base
  modified_base (7)..(7): 2'-hydroxy corresponding base
  modified_base (8)..(8): 2'-hydroxy corresponding base
  modified_base (9)..(9): 2'-hydroxy corresponding base
  modified_base (10)..(10): 2'-hydroxy corresponding base
  modified_base (11)..(11): 2'-hydroxy corresponding base
  modified_base (12)..(12): 2'-hydroxy corresponding base
  modified_base (13)..(13): 2'-hydroxy corresponding base
  modified_base (14)..(14): 2'-hydroxy corresponding base
  modified_base (15)..(15): 2'-hydroxy corresponding base
  modified_base (16)..(16): 2'-hydroxy corresponding base
  modified_base (17)..(17): 2'-hydroxy corresponding base
  modified_base (18)..(18): 2'-hydroxy corresponding base
  modified_base (19)..(19): 2'-hydroxy corresponding base
  modified_base (20)..(20): deoxythymidine
  modified_base (21)..(21): deoxythymidine
uagacaacacguguguagutt

SEQ ID NO: 780 - DNA, 21 bp, Artificial Sequence
  Description of Artificial Sequence: Synthetic oligonucleotide
  Description of Combined DNA/RNA Molecule: Synthetic oligonucleotide
  siRNAs to PCSK9
  modified_base (1)..(1): 2'-hydroxy corresponding base
  modified_base (2)..(2): 2'-hydroxy corresponding base
  modified_base (3)..(3): 2'-hydroxy corresponding base
  modified_base (4)..(4): 2'-hydroxy corresponding base
  modified_base (5)..(5): 2'-hydroxy corresponding base
  modified_base (6)..(6): 2'-hydroxy corresponding base
  modified_base (7)..(7): 2'-hydroxy corresponding base
  modified_base (8)..(8): 2'-hydroxy corresponding base
  modified_base (9)..(9): 2'-hydroxy corresponding base
  modified_base (10)..(10): 2'-hydroxy corresponding base
  modified_base (11)..(11): 2'-hydroxy corresponding base
  modified_base (12)..(12): 2'-hydroxy corresponding base
  modified_base (13)..(13): 2'-hydroxy corresponding base
  modified_base (14)..(14): 2'-hydroxy corresponding base
  modified_base (15)..(15): 2'-hydroxy corresponding base
  modified_base (16)..(16): 2'-hydroxy corresponding base
  modified_base (17)..(17): 2'-hydroxy corresponding base
  modified_base (18)..(18): 2'-hydroxy corresponding base
  modified_base (19)..(19): 2'-hydroxy corresponding base
  modified_base (20)..(20): deoxythymidine
  modified_base (21)..(21): deoxythymidine
acuacacacguguugucuatt

SEQ ID NO: 781 - DNA, 21 bp, Artificial Sequence
  Description of Artificial Sequence: Synthetic oligonucleotide
  Description of Combined DNA/RNA Molecule: Synthetic oligonucleotide
  siRNAs to PCSK9
  modified_base (1)..(1): 2'-hydroxy corresponding base
  modified_base (2)..(2): 2'-hydroxy corresponding base
  modified_base (3)..(3): 2'-hydroxy corresponding base
  modified_base (4)..(4): 2'-hydroxy corresponding base
  modified_base (5)..(5): 2'-hydroxy corresponding base
  modified_base (6)..(6): 2'-hydroxy corresponding base
  modified_base (7)..(7): 2'-hydroxy corresponding base
  modified_base (8)..(8): 2'-hydroxy corresponding base
  modified_base (9)..(9): 2'-hydroxy corresponding base
  modified_base (10)..(10): 2'-hydroxy corresponding base
  modified_base (11)..(11): 2'-hydroxy corresponding base
  modified_base (12)..(12): 2'-hydroxy corresponding base
  modified_base (13)..(13): 2'-hydroxy corresponding base
  modified_base (14)..(14): 2'-hydroxy corresponding base
  modified_base (15)..(15): 2'-hydroxy corresponding base
  modified_base (16)..(16): 2'-hydroxy corresponding base
  modified_base (17)..(17): 2'-hydroxy corresponding base
  modified_base (18)..(18): 2'-hydroxy corresponding base
  modified_base (19)..(19): 2'-hydroxy corresponding base
  modified_base (20)..(20): deoxythymidine
  modified_base (21)..(21): deoxythymidine
agacaacacguguguaguctt

SEQ ID NO: 782 - DNA, 21 bp, Artificial Sequence
  Description of Artificial Sequence: Synthetic oligonucleotide
  Description of Combined DNA/RNA Molecule: Synthetic oligonucleotide
  siRNAs to PCSK9
  modified_base (1)..(1): 2'-hydroxy corresponding base
  modified_base (2)..(2): 2'-hydroxy corresponding base
  modified_base (3)..(3): 2'-hydroxy corresponding base
  modified_base (4)..(4): 2'-hydroxy corresponding base
  modified_base (5)..(5): 2'-hydroxy corresponding base
  modified_base (6)..(6): 2'-hydroxy corresponding base
  modified_base (7)..(7): 2'-hydroxy corresponding base
  modified_base (8)..(8): 2'-hydroxy corresponding base
  modified_base (9)..(9): 2'-hydroxy corresponding base
  modified_base (10)..(10): 2'-hydroxy corresponding base
  modified_base (11)..(11): 2'-hydroxy corresponding base
  modified_base (12)..(12): 2'-hydroxy corresponding base
  modified_base (13)..(13): 2'-hydroxy corresponding base
  modified_base (14)..(14): 2'-hydroxy corresponding base
  modified_base (15)..(15): 2'-hydroxy corresponding base
  modified_base (16)..(16): 2'-hydroxy corresponding base
  modified_base (17)..(17): 2'-hydroxy corresponding base
  modified_base (18)..(18): 2'-hydroxy corresponding base
  modified_base (19)..(19): 2'-hydroxy corresponding base
  modified_base (20)..(20): deoxythymidine
  modified_base (21)..(21): deoxythymidine
gacuacacacguguugucutt

SEQ ID NO: 783 - DNA, 21 bp, Artificial Sequence
  Description of Artificial Sequence: Synthetic oligonucleotide
  Description of Combined DNA/RNA Molecule: Synthetic oligonucleotide
  siRNAs to PCSK9
  modified_base (1)..(1): 2'-hydroxy corresponding base
  modified_base (2)..(2): 2'-hydroxy corresponding base
  modified_base (3)..(3): 2'-hydroxy corresponding base
  modified_base (4)..(4): 2'-hydroxy corresponding base
  modified_base (5)..(5): 2'-hydroxy corresponding base
  modified_base (6)..(6): 2'-hydroxy corresponding base
  modified_base (7)..(7): 2'-hydroxy corresponding base
  modified_base (8)..(8): 2'-hydroxy corresponding base
  modified_base (9)..(9): 2'-hydroxy corresponding base
  modified_base (10)..(10): 2'-hydroxy corresponding base
  modified_base (11)..(11): 2'-hydroxy corresponding base
  modified_base (12)..(12): 2'-hydroxy corresponding base
  modified_base (13)..(13): 2'-hydroxy corresponding base
  modified_base (14)..(14): 2'-hydroxy corresponding base
  modified_base (15)..(15): 2'-hydroxy corresponding base
  modified_base (16)..(16): 2'-hydroxy corresponding base
  modified_base (17)..(17): 2'-hydroxy corresponding base
  modified_base (18)..(18): 2'-hydroxy corresponding base
  modified_base (19)..(19): 2'-hydroxy corresponding base
  modified_base (20)..(20): deoxythymidine
  modified_base (21)..(21): deoxythymidine
gacaacacguguguagucatt

SEQ ID NO: 784 - DNA, 21 bp, Artificial Sequence
  Description of Artificial Sequence: Synthetic oligonucleotide
  Description of Combined DNA/RNA Molecule: Synthetic oligonucleotide
  siRNAs to PCSK9
  modified_base (1)..(1): 2'-hydroxy corresponding base
  modified_base (2)..(2): 2'-hydroxy corresponding base
  modified_base (3)..(3): 2'-hydroxy corresponding base
  modified_base (4)..(4): 2'-hydroxy corresponding base
  modified_base (5)..(5): 2'-hydroxy corresponding base
  modified_base (6)..(6): 2'-hydroxy corresponding base
  modified_base (7)..(7): 2'-hydroxy corresponding base
  modified_base (8)..(8): 2'-hydroxy corresponding base
  modified_base (9)..(9): 2'-hydroxy corresponding base
  modified_base (10)..(10): 2'-hydroxy corresponding base
  modified_base (11)..(11): 2'-hydroxy corresponding base
  modified_base (12)..(12): 2'-hydroxy corresponding base
  modified_base (13)..(13): 2'-hydroxy corresponding base
  modified_base (14)..(14): 2'-hydroxy corresponding base
  modified_base (15)..(15): 2'-hydroxy corresponding base
  modified_base (16)..(16): 2'-hydroxy corresponding base
  modified_base (17)..(17): 2'-hydroxy corresponding base
  modified_base (18)..(18): 2'-hydroxy corresponding base
  modified_base (19)..(19): 2'-hydroxy corresponding base
  modified_base (20)..(20): deoxythymidine
  modified_base (21)..(21): deoxythymidine
ugacuacacacguguuguctt

SEQ ID NO: 785 - DNA, 21 bp, Artificial Sequence
  Description of Artificial Sequence: Synthetic oligonucleotide
  Description of Combined DNA/RNA Molecule: Synthetic oligonucleotide
  siRNAs to PCSK9
  modified_base (1)..(1): 2'-hydroxy corresponding base
  modified_base (2)..(2): 2'-hydroxy corresponding base
  modified_base (3)..(3): 2'-hydroxy corresponding base
  modified_base (4)..(4): 2'-hydroxy corresponding base
  modified_base (5)..(5): 2'-hydroxy corresponding base
  modified_base (6)..(6): 2'-hydroxy corresponding base
  modified_base (7)..(7): 2'-hydroxy corresponding base
  modified_base (8)..(8): 2'-hydroxy corresponding base
  modified_base (9)..(9): 2'-hydroxy corresponding base
  modified_base (10)..(10): 2'-hydroxy corresponding base
  modified_base (11)..(11): 2'-hydroxy corresponding base
  modified_base (12)..(12): 2'-hydroxy corresponding base
  modified_base (13)..(13): 2'-hydroxy corresponding base
  modified_base (14)..(14): 2'-hydroxy corresponding base
  modified_base (15)..(15): 2'-hydroxy corresponding base
  modified_base (16)..(16): 2'-hydroxy corresponding base
  modified_base (17)..(17): 2'-hydroxy corresponding base
  modified_base (18)..(18): 2'-hydroxy corresponding base
  modified_base (19)..(19): 2'-hydroxy corresponding base
  modified_base (20)..(20): deoxythymidine
  modified_base (21)..(21): deoxythymidine
acaacacguguguagucagtt

SEQ ID NO: 786 - DNA, 21 bp, Artificial Sequence
  Description of Artificial Sequence: Synthetic oligonucleotide
  Description of Combined DNA/RNA Molecule: Synthetic oligonucleotide
  siRNAs to PCSK9
  modified_base (1)..(1): 2'-hydroxy corresponding base
  modified_base (2)..(2): 2'-hydroxy corresponding base
  modified_base (3)..(3): 2'-hydroxy corresponding base
  modified_base (4)..(4): 2'-hydroxy corresponding base
  modified_base (5)..(5): 2'-hydroxy corresponding base
  modified_base (6)..(6): 2'-hydroxy corresponding base
  modified_base (7)..(7): 2'-hydroxy corresponding base
  modified_base (8)..(8): 2'-hydroxy corresponding base
  modified_base (9)..(9): 2'-hydroxy corresponding base
  modified_base (10)..(10): 2'-hydroxy corresponding base
  modified_base (11)..(11): 2'-hydroxy corresponding base
  modified_base (12)..(12): 2'-hydroxy corresponding base
  modified_base (13)..(13): 2'-hydroxy corresponding base
  modified_base (14)..(14): 2'-hydroxy corresponding base
  modified_base (15)..(15): 2'-hydroxy corresponding base
  modified_base (16)..(16): 2'-hydroxy corresponding base
  modified_base (17)..(17): 2'-hydroxy corresponding base
  modified_base (18)..(18): 2'-hydroxy corresponding base
  modified_base (19)..(19): 2'-hydroxy corresponding base
  modified_base (20)..(20): deoxythymidine
  modified_base (21)..(21): deoxythymidine
cugacuacacacguguugutt

SEQ ID NO: 787 - DNA, 21 bp, Artificial Sequence
  Description of Artificial Sequence: Synthetic oligonucleotide
  Description of Combined DNA/RNA Molecule: Synthetic oligonucleotide
  siRNAs to PCSK9
  modified_base (1)..(1): 2'-hydroxy corresponding base
  modified_base (2)..(2): 2'-hydroxy corresponding base
  modified_base (3)..(3): 2'-hydroxy corresponding base
  modified_base (4)..(4): 2'-hydroxy corresponding base
  modified_base (5)..(5): 2'-hydroxy corresponding base
  modified_base (6)..(6): 2'-hydroxy corresponding base
  modified_base (7)..(7): 2'-hydroxy corresponding base
  modified_base (8)..(8): 2'-hydroxy corresponding base
  modified_base (9)..(9): 2'-hydroxy corresponding base
  modified_base (10)..(10): 2'-hydroxy corresponding base
  modified_base (11)..(11): 2'-hydroxy corresponding base
  modified_base (12)..(12): 2'-hydroxy corresponding base
  modified_base (13)..(13): 2'-hydroxy corresponding base
  modified_base (14)..(14): 2'-hydroxy corresponding base
  modified_base (15)..(15): 2'-hydroxy corresponding base
  modified_base (16)..(16): 2'-hydroxy corresponding base
  modified_base (17)..(17): 2'-hydroxy corresponding base
  modified_base (18)..(18): 2'-hydroxy corresponding base
  modified_base (19)..(19): 2'-hydroxy corresponding base
  modified_base (20)..(20): deoxythymidine
  modified_base (21)..(21): deoxythymidine
caacacguguguagucaggtt

SEQ ID NO: 788 - DNA, 21 bp, Artificial Sequence
  Description of Artificial Sequence: Synthetic oligonucleotide
  Description of Combined DNA/RNA Molecule: Synthetic oligonucleotide
  siRNAs to PCSK9
  modified_base (1)..(1): 2'-hydroxy corresponding base
  modified_base (2)..(2): 2'-hydroxy corresponding base
  modified_base (3)..(3): 2'-hydroxy corresponding base
  modified_base (4)..(4): 2'-hydroxy corresponding base
  modified_base (5)..(5): 2'-hydroxy corresponding base
  modified_base (6)..(6): 2'-hydroxy corresponding base
  modified_base (7)..(7): 2'-hydroxy corresponding base
  modified_base (8)..(8): 2'-hydroxy corresponding base
  modified_base (9)..(9): 2'-hydroxy corresponding base
  modified_base (10)..(10): 2'-hydroxy corresponding base
  modified_base (11)..(11): 2'-hydroxy corresponding base
  modified_base (12)..(12): 2'-hydroxy corresponding base
  modified_base (13)..(13): 2'-hydroxy corresponding base
  modified_base (14)..(14): 2'-hydroxy corresponding base
  modified_base (15)..(15): 2'-hydroxy corresponding base
  modified_base (16)..(16): 2'-hydroxy corresponding base
  modified_base (17)..(17): 2'-hydroxy corresponding base
  modified_base (18)..(18): 2'-hydroxy corresponding base
  modified_base (19)..(19): 2'-hydroxy corresponding base
  modified_base (20)..(20): deoxythymidine
  modified_base (21)..(21): deoxythymidine
ccugacuacacacguguugtt

SEQ ID NO: 789 - DNA, 21 bp, Artificial Sequence
  Description of Artificial Sequence: Synthetic oligonucleotide
  Description of Combined DNA/RNA Molecule: Synthetic oligonucleotide
  siRNAs to PCSK9
  modified_base (1)..(1): 2'-hydroxy corresponding base
  modified_base (2)..(2): 2'-hydroxy corresponding base
  modified_base (3)..(3): 2'-hydroxy corresponding base
  modified_base (4)..(4): 2'-hydroxy corresponding base
  modified_base (5)..(5): 2'-hydroxy corresponding base
  modified_base (6)..(6): 2'-hydroxy corresponding base
  modified_base (7)..(7): 2'-hydroxy corresponding base
  modified_base (8)..(8): 2'-hydroxy corresponding base
  modified_base (9)..(9): 2'-hydroxy corresponding base
  modified_base (10)..(10): 2'-hydroxy corresponding base
  modified_base (11)..(11): 2'-hydroxy corresponding base
  modified_base (12)..(12): 2'-hydroxy corresponding base
  modified_base (13)..(13): 2'-hydroxy corresponding base
  modified_base (14)..(14): 2'-hydroxy corresponding base
  modified_base (15)..(15): 2'-hydroxy corresponding base
  modified_base (16)..(16): 2'-hydroxy corresponding base
  modified_base (17)..(17): 2'-hydroxy corresponding base
  modified_base (18)..(18): 2'-hydroxy corresponding base
  modified_base (19)..(19): 2'-hydroxy corresponding base
  modified_base (20)..(20): deoxythymidine
  modified_base (21)..(21): deoxythymidine
cacguguguagucaggagctt

SEQ ID NO: 790 - DNA, 21 bp, Artificial Sequence
  Description of Artificial Sequence: Synthetic oligonucleotide
  Description of Combined DNA/RNA Molecule: Synthetic oligonucleotide
  siRNAs to PCSK9
  modified_base (1)..(1): 2'-hydroxy corresponding base
  modified_base (2)..(2): 2'-hydroxy corresponding base
  modified_base (3)..(3): 2'-hydroxy corresponding base
  modified_base (4)..(4): 2'-hydroxy corresponding base
  modified_base (5)..(5): 2'-hydroxy corresponding base
  modified_base (6)..(6): 2'-hydroxy corresponding base
  modified_base (7)..(7): 2'-hydroxy corresponding base
  modified_base (8)..(8): 2'-hydroxy corresponding base
  modified_base (9)..(9): 2'-hydroxy corresponding base
  modified_base (10)..(10): 2'-hydroxy corresponding base
  modified_base (11)..(11): 2'-hydroxy corresponding base
  modified_base (12)..(12): 2'-hydroxy corresponding base
  modified_base (13)..(13): 2'-hydroxy corresponding base
  modified_base (14)..(14): 2'-hydroxy corresponding base
  modified_base (15)..(15): 2'-hydroxy corresponding base
  modified_base (16)..(16): 2'-hydroxy corresponding base
  modified_base (17)..(17): 2'-hydroxy corresponding base
  modified_base (18)..(18): 2'-hydroxy corresponding base
  modified_base (19)..(19): 2'-hydroxy corresponding base
  modified_base (20)..(20): deoxythymidine
  modified_base (21)..(21): deoxythymidine
gcuccugacuacacacgugtt

SEQ ID NO: 791 - DNA, 21 bp, Artificial Sequence
  Description of Artificial Sequence: Synthetic oligonucleotide
  Description of Combined DNA/RNA Molecule: Synthetic oligonucleotide
  siRNAs to PCSK9
  modified_base (1)..(1): 2'-hydroxy corresponding base
  modified_base (2)..(2): 2'-hydroxy corresponding base
  modified_base (3)..(3): 2'-hydroxy corresponding base
  modified_base (4)..(4): 2'-hydroxy corresponding base
  modified_base (5)..(5): 2'-hydroxy corresponding base
  modified_base (6)..(6): 2'-hydroxy corresponding base
  modified_base (7)..(7): 2'-hydroxy corresponding base
  modified_base (8)..(8): 2'-hydroxy corresponding base
  modified_base (9)..(9): 2'-hydroxy corresponding base
  modified_base (10)..(10): 2'-hydroxy corresponding base
  modified_base (11)..(11): 2'-hydroxy corresponding base
  modified_base (12)..(12): 2'-hydroxy corresponding base
  modified_base (13)..(13): 2'-hydroxy corresponding base
  modified_base (14)..(14): 2'-hydroxy corresponding base
  modified_base (15)..(15): 2'-hydroxy corresponding base
  modified_base (16)..(16): 2'-hydroxy corresponding base
  modified_base (17)..(17): 2'-hydroxy corresponding base
  modified_base (18)..(18): 2'-hydroxy corresponding base
  modified_base (19)..(19): 2'-hydroxy corresponding base
  modified_base (20)..(20): deoxythymidine
  modified_base (21)..(21): deoxythymidine
acguguguagucaggagcctt

SEQ ID NO: 792 - DNA, 21 bp, Artificial Sequence
  Description of Artificial Sequence: Synthetic oligonucleotide
  Description of Combined DNA/RNA Molecule: Synthetic oligonucleotide
  siRNAs to PCSK9
  modified_base (1)..(1): 2'-hydroxy corresponding base
  modified_base (2)..(2): 2'-hydroxy corresponding base
  modified_base (3)..(3): 2'-hydroxy corresponding base
  modified_base (4)..(4): 2'-hydroxy corresponding base
  modified_base (5)..(5): 2'-hydroxy corresponding base
  modified_base (6)..(6): 2'-hydroxy corresponding base
  modified_base (7)..(7): 2'-hydroxy corresponding base
  modified_base (8)..(8): 2'-hydroxy corresponding base
  modified_base (9)..(9): 2'-hydroxy corresponding base
  modified_base (10)..(10): 2'-hydroxy corresponding base
  modified_base (11)..(11): 2'-hydroxy corresponding base
  modified_base (12)..(12): 2'-hydroxy corresponding base
  modified_base (13)..(13): 2'-hydroxy corresponding base
  modified_base (14)..(14): 2'-hydroxy corresponding base
  modified_base (15)..(15): 2'-hydroxy corresponding base
  modified_base (16)..(16): 2'-hydroxy corresponding base
  modified_base (17)..(17): 2'-hydroxy corresponding base
  modified_base (18)..(18): 2'-hydroxy corresponding base
  modified_base (19)..(19): 2'-hydroxy corresponding base
  modified_base (20)..(20): deoxythymidine
  modified_base (21)..(21): deoxythymidine
ggcuccugacuacacacgutt

SEQ ID NO: 793 - DNA, 21 bp, Artificial Sequence
  Description of Artificial Sequence: Synthetic oligonucleotide
  Description of Combined DNA/RNA Molecule: Synthetic oligonucleotide
  siRNAs to PCSK9
  modified_base (1)..(1): 2'-hydroxy corresponding base
  modified_base (2)..(2): 2'-hydroxy corresponding base
  modified_base (3)..(3): 2'-hydroxy corresponding base
  modified_base (4)..(4): 2'-hydroxy corresponding base
  modified_base (5)..(5): 2'-hydroxy corresponding base
  modified_base (6)..(6): 2'-hydroxy corresponding base
  modified_base (7)..(7): 2'-hydroxy corresponding base
  modified_base (8)..(8): 2'-hydroxy corresponding base
  modified_base (9)..(9): 2'-hydroxy corresponding base
  modified_base (10)..(10): 2'-hydroxy corresponding base
  modified_base (11)..(11): 2'-hydroxy corresponding base
  modified_base (12)..(12): 2'-hydroxy corresponding base
  modified_base (13)..(13): 2'-hydroxy corresponding base
  modified_base (14)..(14): 2'-hydroxy corresponding base
  modified_base (15)..(15): 2'-hydroxy corresponding base
  modified_base (16)..(16): 2'-hydroxy corresponding base
  modified_base (17)..(17): 2'-hydroxy corresponding base
  modified_base (18)..(18): 2'-hydroxy corresponding base
  modified_base (19)..(19): 2'-hydroxy corresponding base
  modified_base (20)..(20): deoxythymidine
  modified_base (21)..(21): deoxythymidine
cguguguagucaggagccgtt

SEQ ID NO: 794 - DNA, 21 bp, Artificial Sequence
  Description of Artificial Sequence: Synthetic oligonucleotide
  Description of Combined DNA/RNA Molecule: Synthetic oligonucleotide
  siRNAs to PCSK9
  modified_base (1)..(1): 2'-hydroxy corresponding base
  modified_base (2)..(2): 2'-hydroxy corresponding base
  modified_base (3)..(3): 2'-hydroxy corresponding base
  modified_base (4)..(4): 2'-hydroxy corresponding base
  modified_base (5)..(5): 2'-hydroxy corresponding base
  modified_base (6)..(6): 2'-hydroxy corresponding base
  modified_base (7)..(7): 2'-hydroxy corresponding base
  modified_base (8)..(8): 2'-hydroxy corresponding base
  modified_base (9)..(9): 2'-hydroxy corresponding base
  modified_base (10)..(10): 2'-hydroxy corresponding base
  modified_base (11)..(11): 2'-hydroxy corresponding base
  modified_base (12)..(12): 2'-hydroxy corresponding base
  modified_base (13)..(13): 2'-hydroxy corresponding base
  modified_base (14)..(14): 2'-hydroxy corresponding base
  modified_base (15)..(15): 2'-hydroxy corresponding base
  modified_base (16)..(16): 2'-hydroxy corresponding base
  modified_base (17)..(17): 2'-hydroxy corresponding base
  modified_base (18)..(18): 2'-hydroxy corresponding base
  modified_base (19)..(19): 2'-hydroxy corresponding base
  modified_base (20)..(20): deoxythymidine
  modified_base (21)..(21): deoxythymidine
cggcuccugacuacacacgtt

SEQ ID NO: 795 - DNA, 21 bp, Artificial Sequence
  Description of Artificial Sequence: Synthetic oligonucleotide
  Description of Combined DNA/RNA Molecule: Synthetic oligonucleotide
  siRNAs to PCSK9
  modified_base (1)..(1): 2'-hydroxy corresponding base
  modified_base (2)..(2): 2'-hydroxy corresponding base
  modified_base (3)..(3): 2'-hydroxy corresponding base
  modified_base (4)..(4): 2'-hydroxy corresponding base
  modified_base (5)..(5): 2'-hydroxy corresponding base
  modified_base (6)..(6): 2'-hydroxy corresponding base
  modified_base (7)..(7): 2'-hydroxy corresponding base
  modified_base (8)..(8): 2'-hydroxy corresponding base
  modified_base (9)..(9): 2'-hydroxy corresponding base
  modified_base (10)..(10): 2'-hydroxy corresponding base
  modified_base (11)..(11): 2'-hydroxy corresponding base
  modified_base (12)..(12): 2'-hydroxy corresponding base
  modified_base (13)..(13): 2'-hydroxy corresponding base
  modified_base (14)..(14): 2'-hydroxy corresponding base
  modified_base (15)..(15): 2'-hydroxy corresponding base
  modified_base (16)..(16): 2'-hydroxy corresponding base
  modified_base (17)..(17): 2'-hydroxy corresponding base
  modified_base (18)..(18): 2'-hydroxy corresponding base
  modified_base (19)..(19): 2'-hydroxy corresponding base
  modified_base (20)..(20): deoxythymidine
  modified_base (21)..(21): deoxythymidine
uguguagucaggagccgggtt

SEQ ID NO: 796 - DNA, 21 bp, Artificial Sequence
  Description of Artificial Sequence: Synthetic oligonucleotide
  Description of Combined DNA/RNA Molecule: Synthetic oligonucleotide
  siRNAs to PCSK9
  modified_base (1)..(1): 2'-hydroxy corresponding base
  modified_base (2)..(2): 2'-hydroxy corresponding base
  modified_base (3)..(3): 2'-hydroxy corresponding base
  modified_base (4)..(4): 2'-hydroxy corresponding base
  modified_base (5)..(5): 2'-hydroxy corresponding base
  modified_base (6)..(6): 2'-hydroxy corresponding base
  modified_base (7)..(7): 2'-hydroxy corresponding base
  modified_base (8)..(8): 2'-hydroxy corresponding base
  modified_base (9)..(9): 2'-hydroxy corresponding base
  modified_base (10)..(10): 2'-hydroxy corresponding base
  modified_base (11)..(11): 2'-hydroxy corresponding base
  modified_base (12)..(12): 2'-hydroxy corresponding base
  modified_base (13)..(13): 2'-hydroxy corresponding base
  modified_base (14)..(14): 2'-hydroxy corresponding base
  modified_base (15)..(15): 2'-hydroxy corresponding base
  modified_base (16)..(16): 2'-hydroxy corresponding base
  modified_base (17)..(17): 2'-hydroxy corresponding base
  modified_base (18)..(18): 2'-hydroxy corresponding base
  modified_base (19)..(19): 2'-hydroxy corresponding base
  modified_base (20)..(20): deoxythymidine
  modified_base (21)..(21): deoxythymidine
cccggcuccugacuacacatt

SEQ ID NO: 797 - DNA, 21 bp, Artificial Sequence
  Description of Artificial Sequence: Synthetic oligonucleotide
  Description of Combined DNA/RNA Molecule: Synthetic oligonucleotide
  siRNAs to PCSK9
  modified_base (1)..(1): 2'-hydroxy corresponding base
  modified_base (2)..(2): 2'-hydroxy corresponding base
  modified_base (3)..(3): 2'-hydroxy corresponding base
  modified_base (4)..(4): 2'-hydroxy corresponding base
  modified_base (5)..(5): 2'-hydroxy corresponding base
  modified_base (6)..(6): 2'-hydroxy corresponding base
  modified_base (7)..(7): 2'-hydroxy corresponding base
  modified_base (8)..(8): 2'-hydroxy corresponding base
  modified_base (9)..(9): 2'-hydroxy corresponding base
  modified_base (10)..(10): 2'-hydroxy corresponding base
  modified_base (11)..(11): 2'-hydroxy corresponding base
  modified_base (12)..(12): 2'-hydroxy corresponding base
  modified_base (13)..(13): 2'-hydroxy corresponding base
  modified_base (14)..(14): 2'-hydroxy corresponding base
  modified_base (15)..(15): 2'-hydroxy corresponding base
  modified_base (16)..(16): 2'-hydroxy corresponding base
  modified_base (17)..(17): 2'-hydroxy corresponding base
  modified_base (18)..(18): 2'-hydroxy corresponding base
  modified_base (19)..(19): 2'-hydroxy corresponding base
  modified_base (20)..(20): deoxythymidine
  modified_base (21)..(21): 5'-thio thymidine
gucaggagccgggacgucatt

SEQ ID NO: 798 - DNA, 21 bp, Artificial Sequence
  Description of Artificial Sequence: Synthetic oligonucleotide
  Description of Combined DNA/RNA Molecule: Synthetic oligonucleotide
  siRNAs to PCSK9
  modified_base (1)..(1): 2'-hydroxy corresponding base
  modified_base (2)..(2): 2'-hydroxy corresponding base
  modified_base (3)..(3): 2'-hydroxy corresponding base
  modified_base (4)..(4): 2'-hydroxy corresponding base
  modified_base (5)..(5): 2'-hydroxy corresponding base
  modified_base (6)..(6): 2'-hydroxy corresponding base
  modified_base (7)..(7): 2'-hydroxy corresponding base
  modified_base (8)..(8): 2'-hydroxy corresponding base
  modified_base (9)..(9): 2'-hydroxy corresponding base
  modified_base (10)..(10): 2'-hydroxy corresponding base
  modified_base (11)..(11): 2'-hydroxy corresponding base
  modified_base (12)..(12): 2'-hydroxy corresponding base
  modified_base (13)..(13): 2'-hydroxy corresponding base
  modified_base (14)..(14): 2'-hydroxy corresponding base
  modified_base (15)..(15): 2'-hydroxy corresponding base
  modified_base (16)..(16): 2'-hydroxy corresponding base
  modified_base (17)..(17): 2'-hydroxy corresponding base
  modified_base (18)..(18): 2'-hydroxy corresponding base
  modified_base (19)..(19): 2'-hydroxy corresponding base
  modified_base (20)..(20): deoxythymidine
  modified_base (21)..(21): 5'-thio thymidine
ugacgucccggcuccugactt

SEQ ID NO: 799 - DNA, 21 bp, Artificial Sequence
  Description of Artificial Sequence: Synthetic oligonucleotide
  Description of Combined DNA/RNA Molecule: Synthetic oligonucleotide
  siRNAs to PCSK9
  modified_base (1)..(1): 2'-hydroxy corresponding base
  modified_base (2)..(2): 2'-O-methyl corresponding base
  modified_base (3)..(3): 2'-O-methyl corresponding base
  modified_base (4)..(4): 2'-hydroxy corresponding base
  modified_base (5)..(5): 2'-hydroxy corresponding base
  modified_base (6)..(6): 2'-hydroxy corresponding base
  modified_base (7)..(7): 2'-hydroxy corresponding base
  modified_base (8)..(8): 2'-hydroxy corresponding base
  modified_base (9)..(9): 2'-O-methyl corresponding base
  modified_base (10)..(10): 2'-O-methyl corresponding base
  modified_base (11)..(11): 2'-hydroxy corresponding base
  modified_base (12)..(12): 2'-hydroxy corresponding base
  modified_base (13)..(13): 2'-hydroxy corresponding base
  modified_base (14)..(14): 2'-hydroxy corresponding base
  modified_base (15)..(15): 2'-O-methyl corresponding base
  modified_base (16)..(16): 2'-hydroxy corresponding base
  modified_base (17)..(17): 2'-O-methyl corresponding base
  modified_base (18)..(18): 2'-O-methyl corresponding base
  modified_base (19)..(19): 2'-hydroxy corresponding base
  modified_base (20)..(20): deoxythymidine
  modified_base (21)..(21): 5'-thio thymidine
gucaggagccgggacgucatt

SEQ ID NO: 800 - DNA, 21 bp, Artificial Sequence
  Description of Artificial Sequence: Synthetic oligonucleotide
  Description of Combined DNA/RNA Molecule: Synthetic oligonucleotide
  siRNAs to PCSK9
  modified_base (1)..(1): 2'-hydroxy corresponding base
  modified_base (2)..(2): 2'-hydroxy corresponding base
  modified_base (3)..(3): 2'-hydroxy corresponding base
  modified_base (4)..(4): 2'-hydroxy corresponding base
  modified_base (5)..(5): 2'-hydroxy corresponding base
  modified_base (6)..(6): 2'-hydroxy corresponding base
  modified_base (7)..(7): 2'-hydroxy corresponding base
  modified_base (8)..(8): 2'-hydroxy corresponding base
  modified_base (9)..(9): 2'-hydroxy corresponding base
  modified_base (10)..(10): 2'-hydroxy corresponding base
  modified_base (11)..(11): 2'-hydroxy corresponding base
  modified_base (12)..(12): 2'-hydroxy corresponding base
  modified_base (13)..(13): 2'-hydroxy corresponding base
  modified_base (14)..(14): 2'-hydroxy corresponding base
  modified_base (15)..(15): 2'-hydroxy corresponding base
  modified_base (16)..(16): 2'-hydroxy corresponding base
  modified_base (17)..(17): 2'-hydroxy corresponding base
  modified_base (18)..(18): 2'-hydroxy corresponding base
  modified_base (19)..(19): 2'-hydroxy corresponding base
  modified_base (20)..(20): deoxythymidine
  modified_base (21)..(21): 5'-thio thymidine
ugacgucccggcuccugactt

SEQ ID NO: 801 - DNA, 21 bp, Artificial Sequence
  Description of Artificial Sequence: Synthetic oligonucleotide
  Description of Combined DNA/RNA Molecule: Synthetic oligonucleotide
  siRNAs to PCSK9
  modified_base (1)..(1): 2'-hydroxy corresponding base
  modified_base (2)..(2): 2'-hydroxy corresponding base
  modified_base (3)..(3): 2'-hydroxy corresponding base
  modified_base (4)..(4): 2'-hydroxy corresponding base
  modified_base (5)..(5): 2'-hydroxy corresponding base
  modified_base (6)..(6): 2'-hydroxy corresponding base
  modified_base (7)..(7): 2'-hydroxy corresponding base
  modified_base (8)..(8): 2'-hydroxy corresponding base
  modified_base (9)..(9): 2'-hydroxy corresponding base
  modified_base (10)..(10): 2'-hydroxy corresponding base
  modified_base (11)..(11): 2'-hydroxy corresponding base
  modified_base (12)..(12): 2'-hydroxy corresponding base
  modified_base (13)..(13): 2'-hydroxy corresponding base
  modified_base (14)..(14): 2'-hydroxy corresponding base
  modified_base (15)..(15): 2'-hydroxy corresponding base
  modified_base (16)..(16): 2'-hydroxy corresponding base
  modified_base (17)..(17): 2'-hydroxy corresponding base
  modified_base (18)..(18): 2'-hydroxy corresponding base
  modified_base (19)..(19): 2'-hydroxy corresponding base
  modified_base (20)..(20): deoxythymidine
  modified_base (21)..(21): 5'-thio thymidine
ucaggagccgggacgucagtt

SEQ ID NO: 802 - DNA, 21 bp, Artificial Sequence
  Description of Artificial Sequence: Synthetic oligonucleotide
  Description of Combined DNA/RNA Molecule: Synthetic oligonucleotide
  siRNAs to PCSK9
  modified_base (1)..(1): 2'-hydroxy corresponding base
  modified_base (2)..(2): 2'-hydroxy corresponding base
  modified_base (3)..(3): 2'-hydroxy corresponding base
  modified_base (4)..(4): 2'-hydroxy corresponding base
  modified_base (5)..(5): 2'-hydroxy corresponding base
  modified_base (6)..(6): 2'-hydroxy corresponding base
  modified_base (7)..(7): 2'-hydroxy corresponding base
  modified_base (8)..(8): 2'-hydroxy corresponding base
  modified_base (9)..(9): 2'-hydroxy corresponding base
  modified_base (10)..(10): 2'-hydroxy corresponding base
  modified_base (11)..(11): 2'-hydroxy corresponding base
  modified_base (12)..(12): 2'-hydroxy corresponding base
  modified_base (13)..(13): 2'-hydroxy corresponding base
  modified_base (14)..(14): 2'-hydroxy corresponding base
  modified_base (15)..(15): 2'-hydroxy corresponding base
  modified_base (16)..(16): 2'-hydroxy corresponding base
  modified_base (17)..(17): 2'-hydroxy corresponding base
  modified_base (18)..(18): 2'-hydroxy corresponding base
  modified_base (19)..(19): 2'-hydroxy corresponding base
  modified_base (20)..(20): deoxythymidine
  modified_base (21)..(21): 5'-thio thymidine
cugacgucccggcuccugatt

SEQ ID NO: 803 - DNA, 21 bp, Artificial Sequence
  Description of Artificial Sequence: Synthetic oligonucleotide
  Description of Combined DNA/RNA Molecule: Synthetic oligonucleotide
  siRNAs to PCSK9
  modified_base (1)..(1): 2'-O-methyl corresponding base
  modified_base (2)..(2): 2'-O-methyl corresponding base
  modified_base (3)..(3): 2'-hydroxy corresponding base
  modified_base (4)..(4): 2'-hydroxy corresponding base
  modified_base (5)..(5): 2'-hydroxy corresponding base
  modified_base (6)..(6): 2'-hydroxy corresponding base
  modified_base (7)..(7): 2'-hydroxy corresponding base
  modified_base (8)..(8): 2'-O-methyl corresponding base
  modified_base (9)..(9): 2'-O-methyl corresponding base
  modified_base (10)..(10): 2'-hydroxy corresponding base
  modified_base (11)..(11): 2'-hydroxy corresponding base
  modified_base (12)..(12): 2'-hydroxy corresponding base
  modified_base (13)..(13): 2'-hydroxy corresponding base
  modified_base (14)..(14): 2'-O-methyl corresponding base
  modified_base (15)..(15): 2'-hydroxy corresponding base
  modified_base (16)..(16): 2'-O-methyl corresponding base
  modified_base (17)..(17): 2'-O-methyl corresponding base
  modified_base (18)..(18): 2'-hydroxy corresponding base
  modified_base (19)..(19): 2'-hydroxy corresponding base
  modified_base (20)..(20): deoxythymidine
  modified_base (21)..(21): 5'-thio thymidine
ucaggagccgggacgucagtt

SEQ ID NO: 804 - DNA, 21 bp, Artificial Sequence
  Description of Artificial Sequence: Synthetic oligonucleotide
  Description of Combined DNA/RNA Molecule: Synthetic oligonucleotide
  siRNAs to PCSK9
  modified_base (1)..(1): 2'-hydroxy corresponding base
  modified_base (2)..(2): 2'-hydroxy corresponding base
  modified_base (3)..(3): 2'-hydroxy corresponding base
  modified_base (4)..(4): 2'-hydroxy corresponding base
  modified_base (5)..(5): 2'-hydroxy corresponding base
  modified_base (6)..(6): 2'-hydroxy corresponding base
  modified_base (7)..(7): 2'-hydroxy corresponding base
  modified_base (8)..(8): 2'-hydroxy corresponding base
  modified_base (9)..(9): 2'-hydroxy corresponding base
  modified_base (10)..(10): 2'-hydroxy corresponding base
  modified_base (11)..(11): 2'-hydroxy corresponding base
  modified_base (12)..(12): 2'-hydroxy corresponding base
  modified_base (13)..(13): 2'-hydroxy corresponding base
  modified_base (14)..(14): 2'-hydroxy corresponding base
  modified_base (15)..(15): 2'-hydroxy corresponding base
  modified_base (16)..(16): 2'-hydroxy corresponding base
  modified_base (17)..(17): 2'-hydroxy corresponding base
  modified_base (18)..(18): 2'-hydroxy corresponding base
  modified_base (19)..(19): 2'-hydroxy corresponding base
  modified_base (20)..(20): deoxythymidine
  modified_base (21)..(21): 5'-thio thymidine
cugacgucccggcuccugatt

SEQ ID NO: 805 - DNA, 21 bp, Artificial Sequence
  Description of Artificial Sequence: Synthetic oligonucleotide
  Description of Combined DNA/RNA Molecule: Synthetic oligonucleotide
  siRNAs to PCSK9
  modified_base (1)..(1): 2'-hydroxy corresponding base
  modified_base (2)..(2): 2'-hydroxy corresponding base
  modified_base (3)..(3): 2'-hydroxy corresponding base
  modified_base (4)..(4): 2'-hydroxy corresponding base
  modified_base (5)..(5): 2'-hydroxy corresponding base
  modified_base (6)..(6): 2'-hydroxy corresponding base
  modified_base (7)..(7): 2'-hydroxy corresponding base
  modified_base (8)..(8): 2'-hydroxy corresponding base
  modified_base (9)..(9): 2'-hydroxy corresponding base
  modified_base (10)..(10): 2'-hydroxy corresponding base
  modified_base (11)..(11): 2'-hydroxy corresponding base
  modified_base (12)..(12): 2'-hydroxy corresponding base
  modified_base (13)..(13): 2'-hydroxy corresponding base
  modified_base (14)..(14): 2'-hydroxy corresponding base
  modified_base (15)..(15): 2'-hydroxy corresponding base
  modified_base (16)..(16): 2'-hydroxy corresponding base
  modified_base (17)..(17): 2'-hydroxy corresponding base
  modified_base (18)..(18): 2'-hydroxy corresponding base
  modified_base (19)..(19): 2'-hydroxy corresponding base
  modified_base (20)..(20): deoxythymidine
  modified_base (21)..(21): 5'-thio thymidine
caggagccgggacgucagctt

SEQ ID NO: 806 - DNA, 21 bp, Artificial Sequence
  Description of Artificial Sequence: Synthetic oligonucleotide
  Description of Combined DNA/RNA Molecule: Synthetic oligonucleotide
  siRNAs to PCSK9
  modified_base (1)..(1): 2'-hydroxy corresponding base
  modified_base (2)..(2): 2'-hydroxy corresponding base
  modified_base (3)..(3): 2'-hydroxy corresponding base
  modified_base (4)..(4): 2'-hydroxy corresponding base
  modified_base (5)..(5): 2'-hydroxy corresponding base
  modified_base (6)..(6): 2'-hydroxy corresponding base
  modified_base (7)..(7): 2'-hydroxy corresponding base
  modified_base (8)..(8): 2'-hydroxy corresponding base
  modified_base (9)..(9): 2'-hydroxy corresponding base
  modified_base (10)..(10): 2'-hydroxy corresponding base
  modified_base (11)..(11): 2'-hydroxy corresponding base
  modified_base (12)..(12): 2'-hydroxy corresponding base
  modified_base (13)..(13): 2'-hydroxy corresponding base
  modified_base (14)..(14): 2'-hydroxy corresponding base
  modified_base (15)..(15): 2'-hydroxy corresponding base
  modified_base (16)..(16): 2'-hydroxy corresponding base
  modified_base (17)..(17): 2'-hydroxy corresponding base
  modified_base (18)..(18): 2'-hydroxy corresponding base
  modified_base (19)..(19): 2'-hydroxy corresponding base
  modified_base (20)..(20): deoxythymidine
  modified_base (21)..(21): 5'-thio thymidine
gcugacgucccggcuccugtt

SEQ ID NO: 807 - DNA, 21 bp, Artificial Sequence
  Description of Artificial Sequence: Synthetic oligonucleotide
  Description of Combined DNA/RNA Molecule: Synthetic oligonucleotide
  siRNAs to PCSK9
  modified_base (1)..(1): 2'-O-methyl corresponding base
  modified_base (2)..(2): 2'-hydroxy corresponding base
  modified_base (3)..(3): 2'-hydroxy corresponding base
  modified_base (4)..(4): 2'-hydroxy corresponding base
  modified_base (5)..(5): 2'-hydroxy corresponding base
  modified_base (6)..(6): 2'-hydroxy corresponding base
  modified_base (7)..(7): 2'-O-methyl corresponding base
  modified_base (8)..(8): 2'-O-methyl corresponding base
  modified_base (9)..(9): 2'-hydroxy corresponding base
  modified_base (10)..(10): 2'-hydroxy corresponding base
  modified_base (11)..(11): 2'-hydroxy corresponding base
  modified_base (12)..(12): 2'-hydroxy corresponding base
  modified_base (13)..(13): 2'-O-methyl corresponding base
  modified_base (14)..(14): 2'-hydroxy corresponding base
  modified_base (15)..(15): 2'-O-methyl corresponding base
  modified_base (16)..(16): 2'-O-methyl corresponding base
  modified_base (17)..(17): 2'-hydroxy corresponding base
  modified_base (18)..(18): 2'-hydroxy corresponding base
  modified_base (19)..(19): 2'-O-methyl corresponding base
  modified_base (20)..(20): deoxythymidine
  modified_base (21)..(21): 5'-thio thymidine
caggagccgggacgucagctt

SEQ ID NO: 808 - DNA, 21 bp, Artificial Sequence
  Description of Artificial Sequence: Synthetic oligonucleotide
  Description of Combined DNA/RNA Molecule: Synthetic oligonucleotide
  siRNAs to PCSK9
  modified_base (1)..(1): 2'-hydroxy corresponding base
  modified_base (2)..(2): 2'-hydroxy corresponding base
  modified_base (3)..(3): 2'-hydroxy corresponding base
  modified_base (4)..(4): 2'-hydroxy corresponding base
  modified_base (5)..(5): 2'-hydroxy corresponding base
  modified_base (6)..(6): 2'-hydroxy corresponding base
  modified_base (7)..(7): 2'-hydroxy corresponding base
  modified_base (8)..(8): 2'-hydroxy corresponding base
  modified_base (9)..(9): 2'-hydroxy corresponding base
  modified_base (10)..(10): 2'-hydroxy corresponding base
  modified_base (11)..(11): 2'-hydroxy corresponding base
  modified_base (12)..(12): 2'-hydroxy corresponding base
  modified_base (13)..(13): 2'-hydroxy corresponding base
  modified_base (14)..(14): 2'-hydroxy corresponding base
  modified_base (15)..(15): 2'-hydroxy corresponding base
  modified_base (16)..(16): 2'-hydroxy corresponding base
  modified_base (17)..(17): 2'-hydroxy corresponding base
  modified_base (18)..(18): 2'-hydroxy corresponding base
  modified_base (19)..(19): 2'-hydroxy corresponding base
  modified_base (20)..(20): deoxythymidine
  modified_base (21)..(21): 5'-thio thymidine
gcugacgucccggcuccugtt

SEQ ID NO: 809 - DNA, 21 bp, Artificial Sequence
  Description of Artificial Sequence: Synthetic oligonucleotide
  Description of Combined DNA/RNA Molecule: Synthetic oligonucleotide
  siRNAs to PCSK9
  modified_base (1)..(1): 2'-hydroxy corresponding base
  modified_base (2)..(2): 2'-hydroxy corresponding base
  modified_base (3)..(3): 2'-hydroxy corresponding base
  modified_base (4)..(4): 2'-hydroxy corresponding base
  modified_base (5)..(5): 2'-hydroxy corresponding base
  modified_base (6)..(6): 2'-hydroxy corresponding base
  modified_base (7)..(7): 2'-hydroxy corresponding base
  modified_base (8)..(8): 2'-hydroxy corresponding base
  modified_base (9)..(9): 2'-hydroxy corresponding base
  modified_base (10)..(10): 2'-hydroxy corresponding base
  modified_base (11)..(11): 2'-hydroxy corresponding base
  modified_base (12)..(12): 2'-hydroxy corresponding base
  modified_base (13)..(13): 2'-hydroxy corresponding base
  modified_base (14)..(14): 2'-hydroxy corresponding base
  modified_base (15)..(15): 2'-hydroxy corresponding base
  modified_base (16)..(16): 2'-hydroxy corresponding base
  modified_base (17)..(17): 2'-hydroxy corresponding base
  modified_base (18)..(18): 2'-hydroxy corresponding base
  modified_base (19)..(19): 2'-hydroxy corresponding base
  modified_base (20)..(20): deoxythymidine
  modified_base (21)..(21): deoxythymidine
agccgggacgucagcacuatt

SEQ ID NO: 810 - DNA, 21 bp, Artificial Sequence
  Description of Artificial Sequence: Synthetic oligonucleotide
  Description of Combined DNA/RNA Molecule: Synthetic oligonucleotide
  siRNAs to PCSK9
  modified_base (1)..(1): 2'-hydroxy corresponding base
  modified_base (2)..(2): 2'-hydroxy corresponding base
  modified_base (3)..(3): 2'-hydroxy corresponding base
  modified_base (4)..(4): 2'-hydroxy corresponding base
  modified_base (5)..(5): 2'-hydroxy corresponding base
  modified_base (6)..(6): 2'-hydroxy corresponding base
  modified_base (7)..(7): 2'-hydroxy corresponding base
  modified_base (8)..(8): 2'-hydroxy corresponding base
  modified_base (9)..(9): 2'-hydroxy corresponding base
  modified_base (10)..(10): 2'-hydroxy corresponding base
  modified_base (11)..(11): 2'-hydroxy corresponding base
  modified_base (12)..(12): 2'-hydroxy corresponding base
  modified_base (13)..(13): 2'-hydroxy corresponding base
  modified_base (14)..(14): 2'-hydroxy corresponding base
  modified_base (15)..(15): 2'-hydroxy corresponding base
  modified_base (16)..(16): 2'-hydroxy corresponding base
  modified_base (17)..(17): 2'-hydroxy corresponding base
  modified_base (18)..(18): 2'-hydroxy corresponding base
  modified_base (19)..(19): 2'-hydroxy corresponding base
  modified_base (20)..(20): deoxythymidine
  modified_base (21)..(21): deoxythymidine
uagugcugacgucccggcutt

SEQ ID NO: 811 - DNA, 21 bp, Artificial Sequence
  Description of Artificial Sequence: Synthetic oligonucleotide
  Description of Combined DNA/RNA Molecule: Synthetic oligonucleotide
  siRNAs to PCSK9
  modified_base (1)..(1): 2'-hydroxy corresponding base
  modified_base (2)..(2): 2'-hydroxy corresponding base
  modified_base (3)..(3): 2'-hydroxy corresponding base
  modified_base (4)..(4): 2'-hydroxy corresponding base
  modified_base (5)..(5): 2'-hydroxy corresponding base
  modified_base (6)..(6): 2'-hydroxy corresponding base
  modified_base (7)..(7): 2'-hydroxy corresponding base
  modified_base (8)..(8): 2'-hydroxy corresponding base
  modified_base (9)..(9): 2'-hydroxy corresponding base
  modified_base (10)..(10): 2'-hydroxy corresponding base
  modified_base (11)..(11): 2'-hydroxy corresponding base
  modified_base (12)..(12): 2'-hydroxy corresponding base
  modified_base (13)..(13): 2'-hydroxy corresponding base
  modified_base (14)..(14): 2'-hydroxy corresponding base
  modified_base (15)..(15): 2'-hydroxy corresponding base
  modified_base (16)..(16): 2'-hydroxy corresponding base
  modified_base (17)..(17): 2'-hydroxy corresponding base
  modified_base (18)..(18): 2'-hydroxy corresponding base
  modified_base (19)..(19): 2'-hydroxy corresponding base
  modified_base (20)..(20): deoxythymidine
  modified_base (21)..(21): deoxythymidine
ccgggacgucagcacuacatt

SEQ ID NO: 812 - DNA, 21 bp, Artificial Sequence
  Description of Artificial Sequence: Synthetic oligonucleotide
  Description of Combined DNA/RNA Molecule: Synthetic oligonucleotide
  siRNAs to PCSK9
  modified_base (1)..(1): 2'-hydroxy corresponding base
  modified_base (2)..(2): 2'-hydroxy corresponding base
  modified_base (3)..(3): 2'-hydroxy corresponding base
  modified_base (4)..(4): 2'-hydroxy corresponding base
  modified_base (5)..(5): 2'-hydroxy corresponding base
  modified_base (6)..(6): 2'-hydroxy corresponding base
  modified_base (7)..(7): 2'-hydroxy corresponding base
  modified_base (8)..(8): 2'-hydroxy corresponding base
  modified_base (9)..(9): 2'-hydroxy corresponding base
  modified_base (10)..(10): 2'-hydroxy corresponding base
  modified_base (11)..(11): 2'-hydroxy corresponding base
  modified_base (12)..(12): 2'-hydroxy corresponding base
  modified_base (13)..(13): 2'-hydroxy corresponding base
  modified_base (14)..(14): 2'-hydroxy corresponding base
  modified_base (15)..(15): 2'-hydroxy corresponding base
  modified_base (16)..(16): 2'-hydroxy corresponding base
  modified_base (17)..(17): 2'-hydroxy corresponding base
  modified_base (18)..(18): 2'-hydroxy corresponding base
  modified_base (19)..(19): 2'-hydroxy corresponding base
  modified_base (20)..(20): deoxythymidine
  modified_base (21)..(21): deoxythymidine
uguagugcugacgucccggtt

SEQ ID NO: 813 - DNA, 21 bp, Artificial Sequence
  Description of Artificial Sequence: Synthetic oligonucleotide
  Description of Combined DNA/RNA Molecule: Synthetic oligonucleotide
  siRNAs to PCSK9
  modified_base (1)..(1): 2'-hydroxy corresponding base
  modified_base (2)..(2): 2'-hydroxy corresponding base
  modified_base (3)..(3): 2'-hydroxy corresponding base
  modified_base (4)..(4): 2'-hydroxy corresponding base
  modified_base (5)..(5): 2'-hydroxy corresponding base
  modified_base (6)..(6): 2'-hydroxy corresponding base
  modified_base (7)..(7): 2'-hydroxy corresponding base
  modified_base (8)..(8): 2'-hydroxy corresponding base
  modified_base (9)..(9): 2'-hydroxy corresponding base
  modified_base (10)..(10): 2'-hydroxy corresponding base
  modified_base (11)..(11): 2'-hydroxy corresponding base
  modified_base (12)..(12): 2'-hydroxy corresponding base
  modified_base (13)..(13): 2'-hydroxy corresponding base
  modified_base (14)..(14): 2'-hydroxy corresponding base
  modified_base (15)..(15): 2'-hydroxy corresponding base
  modified_base (16)..(16): 2'-hydroxy corresponding base
  modified_base (17)..(17): 2'-hydroxy corresponding base
  modified_base (18)..(18): 2'-hydroxy corresponding base
  modified_base (19)..(19): 2'-hydroxy corresponding base
  modified_base (20)..(20): deoxythymidine
  modified_base (21)..(21): deoxythymidine
ccgugacagccguugccautt

SEQ ID NO: 814 - DNA, 21 bp, Artificial Sequence
  Description of Artificial Sequence: Synthetic oligonucleotide
  Description of Combined DNA/RNA Molecule: Synthetic oligonucleotide
  siRNAs to PCSK9
  modified_base (1)..(1): 2'-hydroxy corresponding base
  modified_base (2)..(2): 2'-hydroxy corresponding base
  modified_base (3)..(3): 2'-hydroxy corresponding base
  modified_base (4)..(4): 2'-hydroxy corresponding base
  modified_base (5)..(5): 2'-hydroxy corresponding base
  modified_base (6)..(6): 2'-hydroxy corresponding base
  modified_base (7)..(7): 2'-hydroxy corresponding base
  modified_base (8)..(8): 2'-hydroxy corresponding base
  modified_base (9)..(9): 2'-hydroxy corresponding base
  modified_base (10)..(10): 2'-hydroxy corresponding base
  modified_base (11)..(11): 2'-hydroxy corresponding base
  modified_base (12)..(12): 2'-hydroxy corresponding base
  modified_base (13)..(13): 2'-hydroxy corresponding base
  modified_base (14)..(14): 2'-hydroxy corresponding base
  modified_base (15)..(15): 2'-hydroxy corresponding base
  modified_base (16)..(16): 2'-hydroxy corresponding base
  modified_base (17)..(17): 2'-hydroxy corresponding base
  modified_base (18)..(18): 2'-hydroxy corresponding base
  modified_base (19)..(19): 2'-hydroxy corresponding base
  modified_base (20)..(20): deoxythymidine
  modified_base (21)..(21): deoxythymidine
auggcaacggcugucacggtt

SEQ ID NO: 815 - DNA, 21 bp, Artificial Sequence
  Description of Artificial Sequence: Synthetic oligonucleotide
  Description of Combined DNA/RNA Molecule: Synthetic oligonucleotide
  siRNAs to PCSK9
  modified_base (1)..(1): 2'-hydroxy corresponding base
  modified_base (2)..(2): 2'-hydroxy corresponding base
  modified_base (3)..(3): 2'-hydroxy corresponding base
  modified_base (4)..(4): 2'-hydroxy corresponding base
  modified_base (5)..(5): 2'-hydroxy corresponding base
  modified_base (6)..(6): 2'-hydroxy corresponding base
  modified_base (7)..(7): 2'-hydroxy corresponding base
  modified_base (8)..(8): 2'-hydroxy corresponding base
  modified_base (9)..(9): 2'-hydroxy corresponding base
  modified_base (10)..(10): 2'-hydroxy corresponding base
  modified_base (11)..(11): 2'-hydroxy corresponding base
  modified_base (12)..(12): 2'-hydroxy corresponding base
  modified_base (13)..(13): 2'-hydroxy corresponding base
  modified_base (14)..(14): 2'-hydroxy corresponding base
  modified_base (15)..(15): 2'-hydroxy corresponding base
  modified_base (16)..(16): 2'-hydroxy corresponding base
  modified_base (17)..(17): 2'-hydroxy corresponding base
  modified_base (18)..(18): 2'-hydroxy corresponding base
  modified_base (19)..(19): 2'-hydroxy corresponding base
  modified_base (20)..(20): deoxythymidine
  modified_base (21)..(21): 5'-thio thymidine
gccaucugcugccggagcctt

SEQ ID NO: 816 - DNA, 21 bp, Artificial Sequence
  Description of Artificial Sequence: Synthetic oligonucleotide
  Description of Combined DNA/RNA Molecule: Synthetic oligonucleotide
  siRNAs to PCSK9
  modified_base (1)..(1): 2'-hydroxy corresponding base
  modified_base (2)..(2): 2'-hydroxy corresponding base
  modified_base (3)..(3): 2'-hydroxy corresponding base
  modified_base (4)..(4): 2'-hydroxy corresponding base
  modified_base (5)..(5): 2'-hydroxy corresponding base
  modified_base (6)..(6): 2'-hydroxy corresponding base
  modified_base (7)..(7): 2'-hydroxy corresponding base
  modified_base (8)..(8): 2'-hydroxy corresponding base
  modified_base (9)..(9): 2'-hydroxy corresponding base
  modified_base (10)..(10): 2'-hydroxy corresponding base
  modified_base (11)..(11): 2'-hydroxy corresponding base
  modified_base (12)..(12): 2'-hydroxy corresponding base
  modified_base (13)..(13): 2'-hydroxy corresponding base
  modified_base (14)..(14): 2'-hydroxy corresponding base
  modified_base (15)..(15): 2'-hydroxy corresponding base
  modified_base (16)..(16): 2'-hydroxy corresponding base
  modified_base (17)..(17): 2'-hydroxy corresponding base
  modified_base (18)..(18): 2'-hydroxy corresponding base
  modified_base (19)..(19): 2'-hydroxy corresponding base
  modified_base (20)..(20): deoxythymidine
  modified_base (21)..(21): 5'-thio thymidine
ggcuccggcagcagauggctt

SEQ ID NO: 817 - DNA, 21 bp, Artificial Sequence
  Description of Artificial Sequence: Synthetic oligonucleotide
  Description of Combined DNA/RNA Molecule: Synthetic oligonucleotide
  siRNAs to PCSK9
  modified_base (1)..(1): 2'-hydroxy corresponding base
  modified_base (2)..(2): 2'-hydroxy corresponding base
  modified_base (3)..(3): 2'-hydroxy corresponding base
  modified_base (4)..(4): 2'-hydroxy corresponding base
  modified_base (5)..(5): 2'-hydroxy corresponding base
  modified_base (6)..(6): 2'-hydroxy corresponding base
  modified_base (7)..(7): 2'-hydroxy corresponding base
  modified_base (8)..(8): 2'-hydroxy corresponding base
  modified_base (9)..(9): 2'-hydroxy corresponding base
  modified_base (10)..(10): 2'-hydroxy corresponding base
  modified_base (11)..(11): 2'-hydroxy corresponding base
  modified_base (12)..(12): 2'-hydroxy corresponding base
  modified_base (13)..(13): 2'-hydroxy corresponding base
  modified_base (14)..(14): 2'-hydroxy corresponding base
  modified_base (15)..(15): 2'-hydroxy corresponding base
  modified_base (16)..(16): 2'-hydroxy corresponding base
  modified_base (17)..(17): 2'-hydroxy corresponding base
  modified_base (18)..(18): 2'-hydroxy corresponding base
  modified_base (19)..(19): 2'-hydroxy corresponding base
  modified_base (20)..(20): deoxythymidine
  modified_base (21)..(21): deoxythymidine
cccaucccaggaugggugutt

SEQ ID NO: 818 - DNA, 21 bp, Artificial Sequence
  Description of Artificial Sequence: Synthetic oligonucleotide
  Description of Combined DNA/RNA Molecule: Synthetic oligonucleotide
  siRNAs to PCSK9
  modified_base (1)..(1): 2'-hydroxy corresponding base
  modified_base (2)..(2): 2'-hydroxy corresponding base
  modified_base (3)..(3): 2'-hydroxy corresponding base
  modified_base (4)..(4): 2'-hydroxy corresponding base
  modified_base (5)..(5): 2'-hydroxy corresponding base
  modified_base (6)..(6): 2'-hydroxy corresponding base
  modified_base (7)..(7): 2'-hydroxy corresponding base
  modified_base (8)..(8): 2'-hydroxy corresponding base
  modified_base (9)..(9): 2'-hydroxy corresponding base
  modified_base (10)..(10): 2'-hydroxy corresponding base
  modified_base (11)..(11): 2'-hydroxy corresponding base
  modified_base (12)..(12): 2'-hydroxy corresponding base
  modified_base (13)..(13): 2'-hydroxy corresponding base
  modified_base (14)..(14): 2'-hydroxy corresponding base
  modified_base (15)..(15): 2'-hydroxy corresponding base
  modified_base (16)..(16): 2'-hydroxy corresponding base
  modified_base (17)..(17): 2'-hydroxy corresponding base
  modified_base (18)..(18): 2'-hydroxy corresponding base
  modified_base (19)..(19): 2'-hydroxy corresponding base
  modified_base (20)..(20): deoxythymidine
  modified_base (21)..(21): deoxythymidine
acacccauccugggaugggtt

SEQ ID NO: 819 - DNA, 21 bp, Artificial Sequence
  Description of Artificial Sequence: Synthetic oligonucleotide
  Description of Combined DNA/RNA Molecule: Synthetic oligonucleotide
  siRNAs to PCSK9
  modified_base (1)..(1): 2'-hydroxy corresponding base
  modified_base (2)..(2): 2'-hydroxy corresponding base
  modified_base (3)..(3): 2'-hydroxy corresponding base
  modified_base (4)..(4): 2'-hydroxy corresponding base
  modified_base (5)..(5): 2'-hydroxy corresponding base
  modified_base (6)..(6): 2'-hydroxy corresponding base
  modified_base (7)..(7): 2'-hydroxy corresponding base
  modified_base (8)..(8): 2'-hydroxy corresponding base
  modified_base (9)..(9): 2'-hydroxy corresponding base
  modified_base (10)..(10): 2'-hydroxy corresponding base
  modified_base (11)..(11): 2'-hydroxy corresponding base
  modified_base (12)..(12): 2'-hydroxy corresponding base
  modified_base (13)..(13): 2'-hydroxy corresponding base
  modified_base (14)..(14): 2'-hydroxy corresponding base
  modified_base (15)..(15): 2'-hydroxy corresponding base
  modified_base (16)..(16): 2'-hydroxy corresponding base
  modified_base (17)..(17): 2'-hydroxy corresponding base
  modified_base (18)..(18): 2'-hydroxy corresponding base
  modified_base (19)..(19): 2'-hydroxy corresponding base
  modified_base (20)..(20): deoxythymidine
  modified_base (21)..(21): deoxythymidine
caucccaggaugggugucutt

SEQ ID NO: 820 - DNA, 21 bp, Artificial Sequence
  Description of Artificial Sequence: Synthetic oligonucleotide
  Description of Combined DNA/RNA Molecule: Synthetic oligonucleotide
  siRNAs to PCSK9
  modified_base (1)..(1): 2'-hydroxy corresponding base
  modified_base (2)..(2): 2'-hydroxy corresponding base
  modified_base (3)..(3): 2'-hydroxy corresponding base
  modified_base (4)..(4): 2'-hydroxy corresponding base
  modified_base (5)..(5): 2'-hydroxy corresponding base
  modified_base (6)..(6): 2'-hydroxy corresponding base
  modified_base (7)..(7): 2'-hydroxy corresponding base
  modified_base (8)..(8): 2'-hydroxy corresponding base
  modified_base (9)..(9): 2'-hydroxy corresponding base
  modified_base (10)..(10): 2'-hydroxy corresponding base
  modified_base (11)..(11): 2'-hydroxy corresponding base
  modified_base (12)..(12): 2'-hydroxy corresponding base
  modified_base (13)..(13): 2'-hydroxy corresponding base
  modified_base (14)..(14): 2'-hydroxy corresponding base
  modified_base (15)..(15): 2'-hydroxy corresponding base
  modified_base (16)..(16): 2'-hydroxy corresponding base
  modified_base (17)..(17): 2'-hydroxy corresponding base
  modified_base (18)..(18): 2'-hydroxy corresponding base
  modified_base (19)..(19): 2'-hydroxy corresponding base
  modified_base (20)..(20): deoxythymidine
  modified_base (21)..(21): deoxythymidine
agacacccauccugggaugtt

SEQ ID NO: 821 - DNA, 21 bp, Artificial Sequence
  Description of Artificial Sequence: Synthetic oligonucleotide
  Description of Combined DNA/RNA Molecule: Synthetic oligonucleotide
  siRNAs to PCSK9
  modified_base (1)..(1): 2'-hydroxy corresponding base
  modified_base (2)..(2): 2'-hydroxy corresponding base
  modified_base (3)..(3): 2'-hydroxy corresponding base
  modified_base (4)..(4): 2'-hydroxy corresponding base
  modified_base (5)..(5): 2'-hydroxy corresponding base
  modified_base (6)..(6): 2'-hydroxy corresponding base
  modified_base (7)..(7): 2'-hydroxy corresponding base
  modified_base (8)..(8): 2'-hydroxy corresponding base
  modified_base (9)..(9): 2'-hydroxy corresponding base
  modified_base (10)..(10): 2'-hydroxy corresponding base
  modified_base (11)..(11): 2'-hydroxy corresponding base
  modified_base (12)..(12): 2'-hydroxy corresponding base
  modified_base (13)..(13): 2'-hydroxy corresponding base
  modified_base (14)..(14): 2'-hydroxy corresponding base
  modified_base (15)..(15): 2'-hydroxy corresponding base
  modified_base (16)..(16): 2'-hydroxy corresponding base
  modified_base (17)..(17): 2'-hydroxy corresponding base
  modified_base (18)..(18): 2'-hydroxy corresponding base
  modified_base (19)..(19): 2'-hydroxy corresponding base
  modified_base (20)..(20): deoxythymidine
  modified_base (21)..(21): deoxythymidine
agcuuuaaaaugguuccgatt

SEQ ID NO: 822 - DNA, 21 bp, Artificial Sequence
  Description of Artificial Sequence: Synthetic oligonucleotide
  Description of Combined DNA/RNA Molecule: Synthetic oligonucleotide
  siRNAs to PCSK9
  modified_base (1)..(1): 2'-hydroxy corresponding base
  modified_base (2)..(2): 2'-hydroxy corresponding base
  modified_base (3)..(3): 2'-hydroxy corresponding base
  modified_base (4)..(4): 2'-hydroxy corresponding base
  modified_base (5)..(5): 2'-hydroxy corresponding base
  modified_base (6)..(6): 2'-hydroxy corresponding base
  modified_base (7)..(7): 2'-hydroxy corresponding base
  modified_base (8)..(8): 2'-hydroxy corresponding base
  modified_base (9)..(9): 2'-hydroxy corresponding base
  modified_base (10)..(10): 2'-hydroxy corresponding base
  modified_base (11)..(11): 2'-hydroxy corresponding base
  modified_base (12)..(12): 2'-hydroxy corresponding base
  modified_base (13)..(13): 2'-hydroxy corresponding base
  modified_base (14)..(14): 2'-hydroxy corresponding base
  modified_base (15)..(15): 2'-hydroxy corresponding base
  modified_base (16)..(16): 2'-hydroxy corresponding base
  modified_base (17)..(17): 2'-hydroxy corresponding base
  modified_base (18)..(18): 2'-hydroxy corresponding base
  modified_base (19)..(19): 2'-hydroxy corresponding base
  modified_base (20)..(20): deoxythymidine
  modified_base (21)..(21): deoxythymidine
ucggaaccauuuuaaagcutt

SEQ ID NO: 823 - DNA, 21 bp, Artificial Sequence
  Description of Artificial Sequence: Synthetic oligonucleotide
  Description of Combined DNA/RNA Molecule: Synthetic oligonucleotide
  siRNAs to PCSK9
  modified_base (1)..(1): 2'-hydroxy corresponding base
  modified_base (2)..(2): 2'-hydroxy corresponding base
  modified_base (3)..(3): 2'-hydroxy corresponding base
  modified_base (4)..(4): 2'-hydroxy corresponding base
  modified_base (5)..(5): 2'-hydroxy corresponding base
  modified_base (6)..(6): 2'-hydroxy corresponding base
  modified_base (7)..(7): 2'-hydroxy corresponding base
  modified_base (8)..(8): 2'-hydroxy corresponding base
  modified_base (9)..(9): 2'-hydroxy corresponding base
  modified_base (10)..(10): 2'-hydroxy corresponding base
  modified_base (11)..(11): 2'-hydroxy corresponding base
  modified_base (12)..(12): 2'-hydroxy corresponding base
  modified_base (13)..(13): 2'-hydroxy corresponding base
  modified_base (14)..(14): 2'-hydroxy corresponding base
  modified_base (15)..(15): 2'-hydroxy corresponding base
  modified_base (16)..(16): 2'-hydroxy corresponding base
  modified_base (17)..(17): 2'-hydroxy corresponding base
  modified_base (18)..(18): 2'-hydroxy corresponding base
  modified_base (19)..(19): 2'-hydroxy corresponding base
  modified_base (20)..(20): deoxythymidine
  modified_base (21)..(21): deoxythymidine
gcuuuaaaaugguuccgactt

SEQ ID NO: 824 - DNA, 21 bp, Artificial Sequence
  Description of Artificial Sequence: Synthetic oligonucleotide
  Description of Combined DNA/RNA Molecule: Synthetic oligonucleotide
  siRNAs to PCSK9
  modified_base (1)..(1): 2'-hydroxy corresponding base
  modified_base (2)..(2): 2'-hydroxy corresponding base
  modified_base (3)..(3): 2'-hydroxy corresponding base
  modified_base (4)..(4): 2'-hydroxy corresponding base
  modified_base (5)..(5): 2'-hydroxy corresponding base
  modified_base (6)..(6): 2'-hydroxy corresponding base
  modified_base (7)..(7): 2'-hydroxy corresponding base
  modified_base (8)..(8): 2'-hydroxy corresponding base
  modified_base (9)..(9): 2'-hydroxy corresponding base
  modified_base (10)..(10): 2'-hydroxy corresponding base
  modified_base (11)..(11): 2'-hydroxy corresponding base
  modified_base (12)..(12): 2'-hydroxy corresponding base
  modified_base (13)..(13): 2'-hydroxy corresponding base
  modified_base (14)..(14): 2'-hydroxy corresponding base
  modified_base (15)..(15): 2'-hydroxy corresponding base
  modified_base (16)..(16): 2'-hydroxy corresponding base
  modified_base (17)..(17): 2'-hydroxy corresponding base
  modified_base (18)..(18): 2'-hydroxy corresponding base
  modified_base (19)..(19): 2'-hydroxy corresponding base
  modified_base (20)..(20): deoxythymidine
  modified_base (21)..(21): deoxythymidine
gucggaaccauuuuaaagctt

SEQ ID NO: 825 - DNA, 21 bp, Artificial Sequence
  Description of Artificial Sequence: Synthetic oligonucleotide
  Description of Combined DNA/RNA Molecule: Synthetic oligonucleotide
  siRNAs to PCSK9
  modified_base (1)..(1): 2'-hydroxy corresponding base
  modified_base (2)..(2): 2'-hydroxy corresponding base
  modified_base (3)..(3): 2'-hydroxy corresponding base
  modified_base (4)..(4): 2'-hydroxy corresponding base
  modified_base (5)..(5): 2'-hydroxy corresponding base
  modified_base (6)..(6): 2'-hydroxy corresponding base
  modified_base (7)..(7): 2'-hydroxy corresponding base
  modified_base (8)..(8): 2'-hydroxy corresponding base
  modified_base (9)..(9): 2'-hydroxy corresponding base
  modified_base (10)..(10): 2'-hydroxy corresponding base
  modified_base (11)..(11): 2'-hydroxy corresponding base
  modified_base (12)..(12): 2'-hydroxy corresponding base
  modified_base (13)..(13): 2'-hydroxy corresponding base
  modified_base (14)..(14): 2'-hydroxy corresponding base
  modified_base (15)..(15): 2'-hydroxy corresponding base
  modified_base (16)..(16): 2'-hydroxy corresponding base
  modified_base (17)..(17): 2'-hydroxy corresponding base
  modified_base (18)..(18): 2'-hydroxy corresponding base
  modified_base (19)..(19): 2'-hydroxy corresponding base
  modified_base (20)..(20): deoxythymidine
  modified_base (21)..(21): deoxythymidine
cuuuaaaaugguuccgacutt

SEQ ID NO: 826 - DNA, 21 bp, Artificial Sequence
  Description of Artificial Sequence: Synthetic oligonucleotide
  Description of Combined DNA/RNA Molecule: Synthetic oligonucleotide
  siRNAs to PCSK9
  modified_base (1)..(1): 2'-hydroxy corresponding base
  modified_base (2)..(2): 2'-hydroxy corresponding base
  modified_base (3)..(3): 2'-hydroxy corresponding base
  modified_base (4)..(4): 2'-hydroxy corresponding base
  modified_base (5)..(5): 2'-hydroxy corresponding base
  modified_base (6)..(6): 2'-hydroxy corresponding base
  modified_base (7)..(7): 2'-hydroxy corresponding base
  modified_base (8)..(8): 2'-hydroxy corresponding base
  modified_base (9)..(9): 2'-hydroxy corresponding base
  modified_base (10)..(10): 2'-hydroxy corresponding base
  modified_base (11)..(11): 2'-hydroxy corresponding base
  modified_base (12)..(12): 2'-hydroxy corresponding base
  modified_base (13)..(13): 2'-hydroxy corresponding base
  modified_base (14)..(14): 2'-hydroxy corresponding base
  modified_base (15)..(15): 2'-hydroxy corresponding base
  modified_base (16)..(16): 2'-hydroxy corresponding base
  modified_base (17)..(17): 2'-hydroxy corresponding base
  modified_base (18)..(18): 2'-hydroxy corresponding base
  modified_base (19)..(19): 2'-hydroxy corresponding base
  modified_base (20)..(20): deoxythymidine
  modified_base (21)..(21): deoxythymidine
agucggaaccauuuuaaagtt

SEQ ID NO: 827 - DNA, 21 bp, Artificial Sequence
  Description of Artificial Sequence: Synthetic oligonucleotide
  Description of Combined DNA/RNA Molecule: Synthetic oligonucleotide
  siRNAs to PCSK9
  modified_base (1)..(1): 2'-hydroxy corresponding base
  modified_base (2)..(2): 2'-hydroxy corresponding base
  modified_base (3)..(3): 2'-hydroxy corresponding base
  modified_base (4)..(4): 2'-hydroxy corresponding base
  modified_base (5)..(5): 2'-hydroxy corresponding base
  modified_base (6)..(6): 2'-hydroxy corresponding base
  modified_base (7)..(7): 2'-hydroxy corresponding base
  modified_base (8)..(8): 2'-hydroxy corresponding base
  modified_base (9)..(9): 2'-hydroxy corresponding base
  modified_base (10)..(10): 2'-hydroxy corresponding base
  modified_base (11)..(11): 2'-hydroxy corresponding base
  modified_base (12)..(12): 2'-hydroxy corresponding base
  modified_base (13)..(13): 2'-hydroxy corresponding base
  modified_base (14)..(14): 2'-hydroxy corresponding base
  modified_base (15)..(15): 2'-hydroxy corresponding base
  modified_base (16)..(16): 2'-hydroxy corresponding base
  modified_base (17)..(17): 2'-hydroxy corresponding base
  modified_base (18)..(18): 2'-hydroxy corresponding base
  modified_base (19)..(19): 2'-hydroxy corresponding base
  modified_base (20)..(20): deoxythymidine
  modified_base (21)..(21): deoxythymidine
uuuaaaaugguuccgacuutt

SEQ ID NO: 828 - DNA, 21 bp, Artificial Sequence
  Description of Artificial Sequence: Synthetic oligonucleotide
  Description of Combined DNA/RNA Molecule: Synthetic oligonucleotide
  siRNAs to PCSK9
  modified_base (1)..(1): 2'-hydroxy corresponding base
  modified_base (2)..(2): 2'-hydroxy corresponding base
  modified_base (3)..(3): 2'-hydroxy corresponding base
  modified_base (4)..(4): 2'-hydroxy corresponding base
  modified_base (5)..(5): 2'-hydroxy corresponding base
  modified_base (6)..(6): 2'-hydroxy corresponding base
  modified_base (7)..(7): 2'-hydroxy corresponding base
  modified_base (8)..(8): 2'-hydroxy corresponding base
  modified_base (9)..(9): 2'-hydroxy corresponding base
  modified_base (10)..(10): 2'-hydroxy corresponding base
  modified_base (11)..(11): 2'-hydroxy corresponding base
  modified_base (12)..(12): 2'-hydroxy corresponding base
  modified_base (13)..(13): 2'-hydroxy corresponding base
  modified_base (14)..(14): 2'-hydroxy corresponding base
  modified_base (15)..(15): 2'-hydroxy corresponding base
  modified_base (16)..(16): 2'-hydroxy corresponding base
  modified_base (17)..(17): 2'-hydroxy corresponding base
  modified_base (18)..(18): 2'-hydroxy corresponding base
  modified_base (19)..(19): 2'-hydroxy corresponding base
  modified_base (20)..(20): deoxythymidine
  modified_base (21)..(21): deoxythymidine
aagucggaaccauuuuaaatt

SEQ ID NO: 829 - DNA, 21 bp, Artificial Sequence
  Description of Artificial Sequence: Synthetic oligonucleotide
  Description of Combined DNA/RNA Molecule: Synthetic oligonucleotide
  siRNAs to PCSK9
  modified_base (1)..(1): 2'-hydroxy corresponding base
  modified_base (2)..(2): 2'-hydroxy corresponding base
  modified_base (3)..(3): 2'-hydroxy corresponding base
  modified_base (4)..(4): 2'-hydroxy corresponding base
  modified_base (5)..(5): 2'-hydroxy corresponding base
  modified_base (6)..(6): 2'-hydroxy corresponding base
  modified_base (7)..(7): 2'-hydroxy corresponding base
  modified_base (8)..(8): 2'-hydroxy corresponding base
  modified_base (9)..(9): 2'-hydroxy corresponding base
  modified_base (10)..(10): 2'-hydroxy corresponding base
  modified_base (11)..(11): 2'-hydroxy corresponding base
  modified_base (12)..(12): 2'-hydroxy corresponding base
  modified_base (13)..(13): 2'-hydroxy corresponding base
  modified_base (14)..(14): 2'-hydroxy corresponding base
  modified_base (15)..(15): 2'-hydroxy corresponding base
  modified_base (16)..(16): 2'-hydroxy corresponding base
  modified_base (17)..(17): 2'-hydroxy corresponding base
  modified_base (18)..(18): 2'-hydroxy corresponding base
  modified_base (19)..(19): 2'-hydroxy corresponding base
  modified_base (20)..(20): deoxythymidine
  modified_base (21)..(21): deoxythymidine
uuaaaaugguuccgacuugtt

SEQ ID NO: 830 - DNA, 21 bp, Artificial Sequence
  Description of Artificial Sequence: Synthetic oligonucleotide
  Description of Combined DNA/RNA Molecule: Synthetic oligonucleotide
  siRNAs to PCSK9
  modified_base (1)..(1): 2'-hydroxy corresponding base
  modified_base (2)..(2): 2'-hydroxy corresponding base
  modified_base (3)..(3): 2'-hydroxy corresponding base
  modified_base (4)..(4): 2'-hydroxy corresponding base
  modified_base (5)..(5): 2'-hydroxy corresponding base
  modified_base (6)..(6): 2'-hydroxy corresponding base
  modified_base (7)..(7): 2'-hydroxy corresponding base
  modified_base (8)..(8): 2'-hydroxy corresponding base
  modified_base (9)..(9): 2'-hydroxy corresponding base
  modified_base (10)..(10): 2'-hydroxy corresponding base
  modified_base (11)..(11): 2'-hydroxy corresponding base
  modified_base (12)..(12): 2'-hydroxy corresponding base
  modified_base (13)..(13): 2'-hydroxy corresponding base
  modified_base (14)..(14): 2'-hydroxy corresponding base
  modified_base (15)..(15): 2'-hydroxy corresponding base
  modified_base (16)..(16): 2'-hydroxy corresponding base
  modified_base (17)..(17): 2'-hydroxy corresponding base
  modified_base (18)..(18): 2'-hydroxy corresponding base
  modified_base (19)..(19): 2'-hydroxy corresponding base
  modified_base (20)..(20): deoxythymidine
  modified_base (21)..(21): deoxythymidine
caagucggaaccauuuuaatt

SEQ ID NO: 831 - DNA, 21 bp, Artificial Sequence
  Description of Artificial Sequence: Synthetic oligonucleotide
  Description of Combined DNA/RNA Molecule: Synthetic oligonucleotide
  siRNAs to PCSK9
  modified_base (1)..(1): 2'-hydroxy corresponding base
  modified_base (2)..(2): 2'-hydroxy corresponding base
  modified_base (3)..(3): 2'-hydroxy corresponding base
  modified_base (4)..(4): 2'-hydroxy corresponding base
  modified_base (5)..(5): 2'-hydroxy corresponding base
  modified_base (6)..(6): 2'-hydroxy corresponding base
  modified_base (7)..(7): 2'-hydroxy corresponding base
  modified_base (8)..(8): 2'-hydroxy corresponding base
  modified_base (9)..(9): 2'-hydroxy corresponding base
  modified_base (10)..(10): 2'-hydroxy corresponding base
  modified_base (11)..(11): 2'-hydroxy corresponding base
  modified_base (12)..(12): 2'-hydroxy corresponding base
  modified_base (13)..(13): 2'-hydroxy corresponding base
  modified_base (14)..(14): 2'-hydroxy corresponding base
  modified_base (15)..(15): 2'-hydroxy corresponding base
  modified_base (16)..(16): 2'-hydroxy corresponding base
  modified_base (17)..(17): 2'-hydroxy corresponding base
  modified_base (18)..(18): 2'-hydroxy corresponding base
  modified_base (19)..(19): 2'-hydroxy corresponding base
  modified_base (20)..(20): deoxythymidine
  modified_base (21)..(21): deoxythymidine
uaaaaugguuccgacuugutt

SEQ ID NO: 832 - DNA, 21 bp, Artificial Sequence
  Description of Artificial Sequence: Synthetic oligonucleotide
  Description of Combined DNA/RNA Molecule: Synthetic oligonucleotide
  siRNAs to PCSK9
  modified_base (1)..(1): 2'-hydroxy corresponding base
  modified_base (2)..(2): 2'-hydroxy corresponding base
  modified_base (3)..(3): 2'-hydroxy corresponding base
  modified_base (4)..(4): 2'-hydroxy corresponding base
  modified_base (5)..(5): 2'-hydroxy corresponding base
  modified_base (6)..(6): 2'-hydroxy corresponding base
  modified_base (7)..(7): 2'-hydroxy corresponding base
  modified_base (8)..(8): 2'-hydroxy corresponding base
  modified_base (9)..(9): 2'-hydroxy corresponding base
  modified_base (10)..(10): 2'-hydroxy corresponding base
  modified_base (11)..(11): 2'-hydroxy corresponding base
  modified_base (12)..(12): 2'-hydroxy corresponding base
  modified_base (13)..(13): 2'-hydroxy corresponding base
  modified_base (14)..(14): 2'-hydroxy corresponding base
  modified_base (15)..(15): 2'-hydroxy corresponding base
  modified_base (16)..(16): 2'-hydroxy corresponding base
  modified_base (17)..(17): 2'-hydroxy corresponding base
  modified_base (18)..(18): 2'-hydroxy corresponding base
  modified_base (19)..(19): 2'-hydroxy corresponding base
  modified_base (20)..(20): deoxythymidine
  modified_base (21)..(21): deoxythymidine
acaagucggaaccauuuuatt

SEQ ID NO: 833 - DNA, 21 bp, Artificial Sequence
  Description of Artificial Sequence: Synthetic oligonucleotide
  Description of Combined DNA/RNA Molecule: Synthetic oligonucleotide
  siRNAs to PCSK9
  modified_base (1)..(1): 2'-hydroxy corresponding base
  modified_base (2)..(2): 2'-hydroxy corresponding base
  modified_base (3)..(3): 2'-hydroxy corresponding base
  modified_base (4)..(4): 2'-hydroxy corresponding base
  modified_base (5)..(5): 2'-hydroxy corresponding base
  modified_base (6)..(6): 2'-hydroxy corresponding base
  modified_base (7)..(7): 2'-hydroxy corresponding base
  modified_base (8)..(8): 2'-hydroxy corresponding base
  modified_base (9)..(9): 2'-hydroxy corresponding base
  modified_base (10)..(10): 2'-hydroxy corresponding base
  modified_base (11)..(11): 2'-hydroxy corresponding base
  modified_base (12)..(12): 2'-hydroxy corresponding base
  modified_base (13)..(13): 2'-hydroxy corresponding base
  modified_base (14)..(14): 2'-hydroxy corresponding base
  modified_base (15)..(15): 2'-hydroxy corresponding base
  modified_base (16)..(16): 2'-hydroxy corresponding base
  modified_base (17)..(17): 2'-hydroxy corresponding base
  modified_base (18)..(18): 2'-hydroxy corresponding base
  modified_base (19)..(19): 2'-hydroxy corresponding base
  modified_base (20)..(20): deoxythymidine
  modified_base (21)..(21): deoxythymidine
aaaaugguuccgacuuguctt

SEQ ID NO: 834 - DNA, 21 bp, Artificial Sequence
  Description of Artificial Sequence: Synthetic oligonucleotide
  Description of Combined DNA/RNA Molecule: Synthetic oligonucleotide
  siRNAs to PCSK9
  modified_base (1)..(1): 2'-hydroxy corresponding base
  modified_base (2)..(2): 2'-hydroxy corresponding base
  modified_base (3)..(3): 2'-hydroxy corresponding base
  modified_base (4)..(4): 2'-hydroxy corresponding base
  modified_base (5)..(5): 2'-hydroxy corresponding base
  modified_base (6)..(6): 2'-hydroxy corresponding base
  modified_base (7)..(7): 2'-hydroxy corresponding base
  modified_base (8)..(8): 2'-hydroxy corresponding base
  modified_base (9)..(9): 2'-hydroxy corresponding base
  modified_base (10)..(10): 2'-hydroxy corresponding base
  modified_base (11)..(11): 2'-hydroxy corresponding base
  modified_base (12)..(12): 2'-hydroxy corresponding base
  modified_base (13)..(13): 2'-hydroxy corresponding base
  modified_base (14)..(14): 2'-hydroxy corresponding base
  modified_base (15)..(15): 2'-hydroxy corresponding base
  modified_base (16)..(16): 2'-hydroxy corresponding base
  modified_base (17)..(17): 2'-hydroxy corresponding base
  modified_base (18)..(18): 2'-hydroxy corresponding base
  modified_base (19)..(19): 2'-hydroxy corresponding base
  modified_base (20)..(20): deoxythymidine
  modified_base (21)..(21): deoxythymidine
gacaagucggaaccauuuutt

SEQ ID NO: 835 - DNA, 21 bp, Artificial Sequence
  Description of Artificial Sequence: Synthetic oligonucleotide
  Description of Combined DNA/RNA Molecule: Synthetic oligonucleotide
  siRNAs to PCSK9
  modified_base (1)..(1): 2'-hydroxy corresponding base
  modified_base (2)..(2): 2'-hydroxy corresponding base
  modified_base (3)..(3): 2'-hydroxy corresponding base
  modified_base (4)..(4): 2'-hydroxy corresponding base
  modified_base (5)..(5): 2'-hydroxy corresponding base
  modified_base (6)..(6): 2'-hydroxy corresponding base
  modified_base (7)..(7): 2'-hydroxy corresponding base
  modified_base (8)..(8): 2'-hydroxy corresponding base
  modified_base (9)..(9): 2'-hydroxy corresponding base
  modified_base (10)..(10): 2'-hydroxy corresponding base
  modified_base (11)..(11): 2'-hydroxy corresponding base
  modified_base (12)..(12): 2'-hydroxy corresponding base
  modified_base (13)..(13): 2'-hydroxy corresponding base
  modified_base (14)..(14): 2'-hydroxy corresponding base
  modified_base (15)..(15): 2'-hydroxy corresponding base
  modified_base (16)..(16): 2'-hydroxy corresponding base
  modified_base (17)..(17): 2'-hydroxy corresponding base
  modified_base (18)..(18): 2'-hydroxy corresponding base
  modified_base (19)..(19): 2'-hydroxy corresponding base
  modified_base (20)..(20): deoxythymidine
  modified_base (21)..(21): deoxythymidine
aaaugguuccgacuugucctt

SEQ ID NO: 836 - DNA, 21 bp, Artificial Sequence
  Description of Artificial Sequence: Synthetic oligonucleotide
  Description of Combined DNA/RNA Molecule: Synthetic oligonucleotide
  siRNAs to PCSK9
  modified_base (1)..(1): 2'-hydroxy corresponding base
  modified_base (2)..(2): 2'-hydroxy corresponding base
  modified_base (3)..(3): 2'-hydroxy corresponding base
  modified_base (4)..(4): 2'-hydroxy corresponding base
  modified_base (5)..(5): 2'-hydroxy corresponding base
  modified_base (6)..(6): 2'-hydroxy corresponding base
  modified_base (7)..(7): 2'-hydroxy corresponding base
  modified_base (8)..(8): 2'-hydroxy corresponding base
  modified_base (9)..(9): 2'-hydroxy corresponding base
  modified_base (10)..(10): 2'-hydroxy corresponding base
  modified_base (11)..(11): 2'-hydroxy corresponding base
  modified_base (12)..(12): 2'-hydroxy corresponding base
  modified_base (13)..(13): 2'-hydroxy corresponding base
  modified_base (14)..(14): 2'-hydroxy corresponding base
  modified_base (15)..(15): 2'-hydroxy corresponding base
  modified_base (16)..(16): 2'-hydroxy corresponding base
  modified_base (17)..(17): 2'-hydroxy corresponding base
  modified_base (18)..(18): 2'-hydroxy corresponding base
  modified_base (19)..(19): 2'-hydroxy corresponding base
  modified_base (20)..(20): deoxythymidine
  modified_base (21)..(21): deoxythymidine
ggacaagucggaaccauuutt

SEQ ID NO: 837 - DNA, 21 bp, Artificial Sequence
  Description of Artificial Sequence: Synthetic oligonucleotide
  Description of Combined DNA/RNA Molecule: Synthetic oligonucleotide
  siRNAs to PCSK9
  modified_base (1)..(1): 2'-hydroxy corresponding base
  modified_base (2)..(2): 2'-hydroxy corresponding base
  modified_base (3)..(3): 2'-hydroxy corresponding base
  modified_base (4)..(4): 2'-hydroxy corresponding base
  modified_base (5)..(5): 2'-hydroxy corresponding base
  modified_base (6)..(6): 2'-hydroxy corresponding base
  modified_base (7)..(7): 2'-hydroxy corresponding base
  modified_base (8)..(8): 2'-hydroxy corresponding base
  modified_base (9)..(9): 2'-hydroxy corresponding base
  modified_base (10)..(10): 2'-hydroxy corresponding base
  modified_base (11)..(11): 2'-hydroxy corresponding base
  modified_base (12)..(12): 2'-hydroxy corresponding base
  modified_base (13)..(13): 2'-hydroxy corresponding base
  modified_base (14)..(14): 2'-hydroxy corresponding base
  modified_base (15)..(15): 2'-hydroxy corresponding base
  modified_base (16)..(16): 2'-hydroxy corresponding base
  modified_base (17)..(17): 2'-hydroxy corresponding base
  modified_base (18)..(18): 2'-hydroxy corresponding base
  modified_base (19)..(19): 2'-hydroxy corresponding base
  modified_base (20)..(20): deoxythymidine
  modified_base (21)..(21): deoxythymidine
aaugguuccgacuuguccctt

SEQ ID NO: 838 - DNA, 21 bp, Artificial Sequence
  Description of Artificial Sequence: Synthetic oligonucleotide
  Description of Combined DNA/RNA Molecule: Synthetic oligonucleotide
  siRNAs to PCSK9
  modified_base (1)..(1): 2'-hydroxy corresponding base
  modified_base (2)..(2): 2'-hydroxy corresponding base
  modified_base (3)..(3): 2'-hydroxy corresponding base
  modified_base (4)..(4): 2'-hydroxy corresponding base
  modified_base (5)..(5): 2'-hydroxy corresponding base
  modified_base (6)..(6): 2'-hydroxy corresponding base
  modified_base (7)..(7): 2'-hydroxy corresponding base
  modified_base (8)..(8): 2'-hydroxy corresponding base
  modified_base (9)..(9): 2'-hydroxy corresponding base
  modified_base (10)..(10): 2'-hydroxy corresponding base
  modified_base (11)..(11): 2'-hydroxy corresponding base
  modified_base (12)..(12): 2'-hydroxy corresponding base
  modified_base (13)..(13): 2'-hydroxy corresponding base
  modified_base (14)..(14): 2'-hydroxy corresponding base
  modified_base (15)..(15): 2'-hydroxy corresponding base
  modified_base (16)..(16): 2'-hydroxy corresponding base
  modified_base (17)..(17): 2'-hydroxy corresponding base
  modified_base (18)..(18): 2'-hydroxy corresponding base
  modified_base (19)..(19): 2'-hydroxy corresponding base
  modified_base (20)..(20): deoxythymidine
  modified_base (21)..(21): deoxythymidine
gggacaagucggaaccauutt

SEQ ID NO: 839 - DNA, 21 bp, Artificial Sequence
  Description of Artificial Sequence: Synthetic oligonucleotide
  Description of Combined DNA/RNA Molecule: Synthetic oligonucleotide
  siRNAs to PCSK9
  modified_base (1)..(1): 2'-hydroxy corresponding base
  modified_base (2)..(2): 2'-hydroxy corresponding base
  modified_base (3)..(3): 2'-hydroxy corresponding base
  modified_base (4)..(4): 2'-hydroxy corresponding base
  modified_base (5)..(5): 2'-hydroxy corresponding base
  modified_base (6)..(6): 2'-hydroxy corresponding base
  modified_base (7)..(7): 2'-hydroxy corresponding base
  modified_base (8)..(8): 2'-hydroxy corresponding base
  modified_base (9)..(9): 2'-hydroxy corresponding base
  modified_base (10)..(10): 2'-hydroxy corresponding base
  modified_base (11)..(11): 2'-hydroxy corresponding base
  modified_base (12)..(12): 2'-hydroxy corresponding base
  modified_base (13)..(13): 2'-hydroxy corresponding base
  modified_base (14)..(14): 2'-hydroxy corresponding base
  modified_base (15)..(15): 2'-hydroxy corresponding base
  modified_base (16)..(16): 2'-hydroxy corresponding base
  modified_base (17)..(17): 2'-hydroxy corresponding base
  modified_base (18)..(18): 2'-hydroxy corresponding base
  modified_base (19)..(19): 2'-hydroxy corresponding base
  modified_base (20)..(20): deoxythymidine
  modified_base (21)..(21): deoxythymidine
gguuccgacuugucccucutt

SEQ ID NO: 840 - DNA, 21 bp, Artificial Sequence
  Description of Artificial Sequence: Synthetic oligonucleotide
  Description of Combined DNA/RNA Molecule: Synthetic oligonucleotide
  siRNAs to PCSK9
  modified_base (1)..(1): 2'-hydroxy corresponding base
  modified_base (2)..(2): 2'-hydroxy corresponding base
  modified_base (3)..(3): 2'-hydroxy corresponding base
  modified_base (4)..(4): 2'-hydroxy corresponding base
  modified_base (5)..(5): 2'-hydroxy corresponding base
  modified_base (6)..(6): 2'-hydroxy corresponding base
  modified_base (7)..(7): 2'-hydroxy corresponding base
  modified_base (8)..(8): 2'-hydroxy corresponding base
  modified_base (9)..(9): 2'-hydroxy corresponding base
  modified_base (10)..(10): 2'-hydroxy corresponding base
  modified_base (11)..(11): 2'-hydroxy corresponding base
  modified_base (12)..(12): 2'-hydroxy corresponding base
  modified_base (13)..(13): 2'-hydroxy corresponding base
  modified_base (14)..(14): 2'-hydroxy corresponding base
  modified_base (15)..(15): 2'-hydroxy corresponding base
  modified_base (16)..(16): 2'-hydroxy corresponding base
  modified_base (17)..(17): 2'-hydroxy corresponding base
  modified_base (18)..(18): 2'-hydroxy corresponding base
  modified_base (19)..(19): 2'-hydroxy corresponding base
  modified_base (20)..(20): deoxythymidine
  modified_base (21)..(21): deoxythymidine
agagggacaagucggaacctt

SEQ ID NO: 841 - DNA, 21 bp, Artificial Sequence
  Description of Artificial Sequence: Synthetic oligonucleotide
  Description of Combined DNA/RNA Molecule: Synthetic oligonucleotide
  siRNAs to PCSK9
  modified_base (1)..(1): 2'-hydroxy corresponding base
  modified_base (2)..(2): 2'-hydroxy corresponding base
  modified_base (3)..(3): 2'-hydroxy corresponding base
  modified_base (4)..(4): 2'-hydroxy corresponding base
  modified_base (5)..(5): 2'-hydroxy corresponding base
  modified_base (6)..(6): 2'-hydroxy corresponding base
  modified_base (7)..(7): 2'-hydroxy corresponding base
  modified_base (8)..(8): 2'-hydroxy corresponding base
  modified_base (9)..(9): 2'-hydroxy corresponding base
  modified_base (10)..(10): 2'-hydroxy corresponding base
  modified_base (11)..(11): 2'-hydroxy corresponding base
  modified_base (12)..(12): 2'-hydroxy corresponding base
  modified_base (13)..(13): 2'-hydroxy corresponding base
  modified_base (14)..(14): 2'-hydroxy corresponding base
  modified_base (15)..(15): 2'-hydroxy corresponding base
  modified_base (16)..(16): 2'-hydroxy corresponding base
  modified_base (17)..(17): 2'-hydroxy corresponding base
  modified_base (18)..(18): 2'-hydroxy corresponding base
  modified_base (19)..(19): 2'-hydroxy corresponding base
  modified_base (20)..(20): deoxythymidine
  modified_base (21)..(21): deoxythymidine
cuccauggccuggcacgagtt

SEQ ID NO: 842 - DNA, 21 bp, Artificial Sequence
  Description of Artificial Sequence: Synthetic oligonucleotide
  Description of Combined DNA/RNA Molecule: Synthetic oligonucleotide
  siRNAs to PCSK9
  modified_base (1)..(1): 2'-hydroxy corresponding base
  modified_base (2)..(2): 2'-hydroxy corresponding base
  modified_base (3)..(3): 2'-hydroxy corresponding base
  modified_base (4)..(4): 2'-hydroxy corresponding base
  modified_base (5)..(5): 2'-hydroxy corresponding base
  modified_base (6)..(6): 2'-hydroxy corresponding base
  modified_base (7)..(7): 2'-hydroxy corresponding base
  modified_base (8)..(8): 2'-hydroxy corresponding base
  modified_base (9)..(9): 2'-hydroxy corresponding base
  modified_base (10)..(10): 2'-hydroxy corresponding base
  modified_base (11)..(11): 2'-hydroxy corresponding base
  modified_base (12)..(12): 2'-hydroxy corresponding base
  modified_base (13)..(13): 2'-hydroxy corresponding base
  modified_base (14)..(14): 2'-hydroxy corresponding base
  modified_base (15)..(15): 2'-hydroxy corresponding base
  modified_base (16)..(16): 2'-hydroxy corresponding base
  modified_base (17)..(17): 2'-hydroxy corresponding base
  modified_base (18)..(18): 2'-hydroxy corresponding base
  modified_base (19)..(19): 2'-hydroxy corresponding base
  modified_base (20)..(20): deoxythymidine
  modified_base (21)..(21): deoxythymidine
cucgugccaggccauggagtt

SEQ ID NO: 843 - DNA, 21 bp, Artificial Sequence
  Description of Artificial Sequence: Synthetic oligonucleotide
  Description of Combined DNA/RNA Molecule: Synthetic oligonucleotide
  siRNAs to PCSK9
  modified_base (1)..(1): 2'-hydroxy corresponding base
  modified_base (2)..(2): 2'-hydroxy corresponding base
  modified_base (3)..(3): 2'-hydroxy corresponding base
  modified_base (4)..(4): 2'-hydroxy corresponding base
  modified_base (5)..(5): 2'-hydroxy corresponding base
  modified_base (6)..(6): 2'-hydroxy corresponding base
  modified_base (7)..(7): 2'-hydroxy corresponding base
  modified_base (8)..(8): 2'-hydroxy corresponding base
  modified_base (9)..(9): 2'-hydroxy corresponding base
  modified_base (10)..(10): 2'-hydroxy corresponding base
  modified_base (11)..(11): 2'-hydroxy corresponding base
  modified_base (12)..(12): 2'-hydroxy corresponding base
  modified_base (13)..(13): 2'-hydroxy corresponding base
  modified_base (14)..(14): 2'-hydroxy corresponding base
  modified_base (15)..(15): 2'-hydroxy corresponding base
  modified_base (16)..(16): 2'-hydroxy corresponding base
  modified_base (17)..(17): 2'-hydroxy corresponding base
  modified_base (18)..(18): 2'-hydroxy corresponding base
  modified_base (19)..(19): 2'-hydroxy corresponding base
  modified_base (20)..(20): deoxythymidine
  modified_base (21)..(21): deoxythymidine
ccauggccuggcacgagggtt

SEQ ID NO: 844 - DNA, 21 bp, Artificial Sequence
  Description of Artificial Sequence: Synthetic oligonucleotide
  Description of Combined DNA/RNA Molecule: Synthetic oligonucleotide
  siRNAs to PCSK9
  modified_base (1)..(1): 2'-hydroxy corresponding base
  modified_base (2)..(2): 2'-hydroxy corresponding base
  modified_base (3)..(3): 2'-hydroxy corresponding base
  modified_base (4)..(4): 2'-hydroxy corresponding base
  modified_base (5)..(5): 2'-hydroxy corresponding base
  modified_base (6)..(6): 2'-hydroxy corresponding base
  modified_base (7)..(7): 2'-hydroxy corresponding base
  modified_base (8)..(8): 2'-hydroxy corresponding base
  modified_base (9)..(9): 2'-hydroxy corresponding base
  modified_base (10)..(10): 2'-hydroxy corresponding base
  modified_base (11)..(11): 2'-hydroxy corresponding base
  modified_base (12)..(12): 2'-hydroxy corresponding base
  modified_base (13)..(13): 2'-hydroxy corresponding base
  modified_base (14)..(14): 2'-hydroxy corresponding base
  modified_base (15)..(15): 2'-hydroxy corresponding base
  modified_base (16)..(16): 2'-hydroxy corresponding base
  modified_base (17)..(17): 2'-hydroxy corresponding base
  modified_base (18)..(18): 2'-hydroxy corresponding base
  modified_base (19)..(19): 2'-hydroxy corresponding base
  modified_base (20)..(20): deoxythymidine
  modified_base (21)..(21): deoxythymidine
cccucgugccaggccauggtt

SEQ ID NO: 845 - DNA, 21 bp, Artificial Sequence
  Description of Artificial Sequence: Synthetic oligonucleotide
  Description of Combined DNA/RNA Molecule: Synthetic oligonucleotide
  siRNAs to PCSK9
  modified_base (1)..(1): 2'-hydroxy corresponding base
  modified_base (2)..(2): 2'-hydroxy corresponding base
  modified_base (3)..(3): 2'-hydroxy corresponding base
  modified_base (4)..(4): 2'-hydroxy corresponding base
  modified_base (5)..(5): 2'-hydroxy corresponding base
  modified_base (6)..(6): 2'-hydroxy corresponding base
  modified_base (7)..(7): 2'-hydroxy corresponding base
  modified_base (8)..(8): 2'-hydroxy corresponding base
  modified_base (9)..(9): 2'-hydroxy corresponding base
  modified_base (10)..(10): 2'-hydroxy corresponding base
  modified_base (11)..(11): 2'-hydroxy corresponding base
  modified_base (12)..(12): 2'-hydroxy corresponding base
  modified_base (13)..(13): 2'-hydroxy corresponding base
  modified_base (14)..(14): 2'-hydroxy corresponding base
  modified_base (15)..(15): 2'-hydroxy corresponding base
  modified_base (16)..(16): 2'-hydroxy corresponding base
  modified_base (17)..(17): 2'-hydroxy corresponding base
  modified_base (18)..(18): 2'-hydroxy corresponding base
  modified_base (19)..(19): 2'-hydroxy corresponding base
  modified_base (20)..(20): deoxythymidine
  modified_base (21)..(21): deoxythymidine
gaacucacucacucugggutt

SEQ ID NO: 846 - DNA, 21 bp, Artificial Sequence
  Description of Artificial Sequence: Synthetic oligonucleotide
  Description of Combined DNA/RNA Molecule: Synthetic oligonucleotide
  siRNAs to PCSK9
  modified_base (1)..(1): 2'-hydroxy corresponding base
  modified_base (2)..(2): 2'-hydroxy corresponding base
  modified_base (3)..(3): 2'-hydroxy corresponding base
  modified_base (4)..(4): 2'-hydroxy corresponding base
  modified_base (5)..(5): 2'-hydroxy corresponding base
  modified_base (6)..(6): 2'-hydroxy corresponding base
  modified_base (7)..(7): 2'-hydroxy corresponding base
  modified_base (8)..(8): 2'-hydroxy corresponding base
  modified_base (9)..(9): 2'-hydroxy corresponding base
  modified_base (10)..(10): 2'-hydroxy corresponding base
  modified_base (11)..(11): 2'-hydroxy corresponding base
  modified_base (12)..(12): 2'-hydroxy corresponding base
  modified_base (13)..(13): 2'-hydroxy corresponding base
  modified_base (14)..(14): 2'-hydroxy corresponding base
  modified_base (15)..(15): 2'-hydroxy corresponding base
  modified_base (16)..(16): 2'-hydroxy corresponding base
  modified_base (17)..(17): 2'-hydroxy corresponding base
  modified_base (18)..(18): 2'-hydroxy corresponding base
  modified_base (19)..(19): 2'-hydroxy corresponding base
  modified_base (20)..(20): deoxythymidine
  modified_base (21)..(21): deoxythymidine
acccagagugagugaguuctt

SEQ ID NO: 847 - DNA, 21 bp, Artificial Sequence
  Description of Artificial Sequence: Synthetic oligonucleotide
  Description of Combined DNA/RNA Molecule: Synthetic oligonucleotide
  siRNAs to PCSK9
  modified_base (1)..(1): 2'-hydroxy corresponding base
  modified_base (2)..(2): 2'-hydroxy corresponding base
  modified_base (3)..(3): 2'-hydroxy corresponding base
  modified_base (4)..(4): 2'-hydroxy corresponding base
  modified_base (5)..(5): 2'-hydroxy corresponding base
  modified_base (6)..(6): 2'-hydroxy corresponding base
  modified_base (7)..(7): 2'-hydroxy corresponding base
  modified_base (8)..(8): 2'-hydroxy corresponding base
  modified_base (9)..(9): 2'-hydroxy corresponding base
  modified_base (10)..(10): 2'-hydroxy corresponding base
  modified_base (11)..(11): 2'-hydroxy corresponding base
  modified_base (12)..(12): 2'-hydroxy corresponding base
  modified_base (13)..(13): 2'-hydroxy corresponding base
  modified_base (14)..(14): 2'-hydroxy corresponding base
  modified_base (15)..(15): 2'-hydroxy corresponding base
  modified_base (16)..(16): 2'-hydroxy corresponding base
  modified_base (17)..(17): 2'-hydroxy corresponding base
  modified_base (18)..(18): 2'-hydroxy corresponding base
  modified_base (19)..(19): 2'-hydroxy corresponding base
  modified_base (20)..(20): deoxythymidine
  modified_base (21)..(21): deoxythymidine
ucacucacucugggugccutt

SEQ ID NO: 848 - DNA, 21 bp, Artificial Sequence
  Description of Artificial Sequence: Synthetic oligonucleotide
  Description of Combined DNA/RNA Molecule: Synthetic oligonucleotide
  siRNAs to PCSK9
  modified_base (1)..(1): 2'-hydroxy corresponding base
  modified_base (2)..(2): 2'-hydroxy corresponding base
  modified_base (3)..(3): 2'-hydroxy corresponding base
  modified_base (4)..(4): 2'-hydroxy corresponding base
  modified_base (5)..(5): 2'-hydroxy corresponding base
  modified_base (6)..(6): 2'-hydroxy corresponding base
  modified_base (7)..(7): 2'-hydroxy corresponding base
  modified_base (8)..(8): 2'-hydroxy corresponding base
  modified_base (9)..(9): 2'-hydroxy corresponding base
  modified_base (10)..(10): 2'-hydroxy corresponding base
  modified_base (11)..(11): 2'-hydroxy corresponding base
  modified_base (12)..(12): 2'-hydroxy corresponding base
  modified_base (13)..(13): 2'-hydroxy corresponding base
  modified_base (14)..(14): 2'-hydroxy corresponding base
  modified_base (15)..(15): 2'-hydroxy corresponding base
  modified_base (16)..(16): 2'-hydroxy corresponding base
  modified_base (17)..(17): 2'-hydroxy corresponding base
  modified_base (18)..(18): 2'-hydroxy corresponding base
  modified_base (19)..(19): 2'-hydroxy corresponding base
  modified_base (20)..(20): deoxythymidine
  modified_base (21)..(21): deoxythymidine
aggcacccagagugagugatt

SEQ ID NO: 849 - DNA, 21 bp, Artificial Sequence
  Description of Artificial Sequence: Synthetic oligonucleotide
  Description of Combined DNA/RNA Molecule: Synthetic oligonucleotide
  siRNAs to PCSK9
  modified_base (1)..(1): 2'-hydroxy corresponding base
  modified_base (2)..(2): 2'-hydroxy corresponding base
  modified_base (3)..(3): 2'-hydroxy corresponding base
  modified_base (4)..(4): 2'-hydroxy corresponding base
  modified_base (5)..(5): 2'-hydroxy corresponding base
  modified_base (6)..(6): 2'-hydroxy corresponding base
  modified_base (7)..(7): 2'-hydroxy corresponding base
  modified_base (8)..(8): 2'-hydroxy corresponding base
  modified_base (9)..(9): 2'-hydroxy corresponding base
  modified_base (10)..(10): 2'-hydroxy corresponding base
  modified_base (11)..(11): 2'-hydroxy corresponding base
  modified_base (12)..(12): 2'-hydroxy corresponding base
  modified_base (13)..(13): 2'-hydroxy corresponding base
  modified_base (14)..(14): 2'-hydroxy corresponding base
  modified_base (15)..(15): 2'-hydroxy corresponding base
  modified_base (16)..(16): 2'-hydroxy corresponding base
  modified_base (17)..(17): 2'-hydroxy corresponding base
  modified_base (18)..(18): 2'-hydroxy corresponding base
  modified_base (19)..(19): 2'-hydroxy corresponding base
  modified_base (20)..(20): deoxythymidine
  modified_base (21)..(21): deoxythymidine
uuucaccauucaaacaggutt

SEQ ID NO: 850 - DNA, 21 bp, Artificial Sequence
  Description of Artificial Sequence: Synthetic oligonucleotide
  Description of Combined DNA/RNA Molecule: Synthetic oligonucleotide
  siRNAs to PCSK9
  modified_base (1)..(1): 2'-hydroxy corresponding base
  modified_base (2)..(2): 2'-hydroxy corresponding base
  modified_base (3)..(3): 2'-hydroxy corresponding base
  modified_base (4)..(4): 2'-hydroxy corresponding base
  modified_base (5)..(5): 2'-hydroxy corresponding base
  modified_base (6)..(6): 2'-hydroxy corresponding base
  modified_base (7)..(7): 2'-hydroxy corresponding base
  modified_base (8)..(8): 2'-hydroxy corresponding base
  modified_base (9)..(9): 2'-hydroxy corresponding base
  modified_base (10)..(10): 2'-hydroxy corresponding base
  modified_base (11)..(11): 2'-hydroxy corresponding base
  modified_base (12)..(12): 2'-hydroxy corresponding base
  modified_base (13)..(13): 2'-hydroxy corresponding base
  modified_base (14)..(14): 2'-hydroxy corresponding base
  modified_base (15)..(15): 2'-hydroxy corresponding base
  modified_base (16)..(16): 2'-hydroxy corresponding base
  modified_base (17)..(17): 2'-hydroxy corresponding base
  modified_base (18)..(18): 2'-hydroxy corresponding base
  modified_base (19)..(19): 2'-hydroxy corresponding base
  modified_base (20)..(20): deoxythymidine
  modified_base (21)..(21): deoxythymidine
accuguuugaauggugaaatt

SEQ ID NO: 851 - DNA, 21 bp, Artificial Sequence
  Description of Artificial Sequence: Synthetic oligonucleotide
  Description of Combined DNA/RNA Molecule: Synthetic oligonucleotide
  siRNAs to PCSK9
  modified_base (1)..(1): 2'-hydroxy corresponding base
  modified_base (2)..(2): 2'-hydroxy corresponding base
  modified_base (3)..(3): 2'-hydroxy corresponding base
  modified_base (4)..(4): 2'-hydroxy corresponding base
  modified_base (5)..(5): 2'-hydroxy corresponding base
  modified_base (6)..(6): 2'-hydroxy corresponding base
  modified_base (7)..(7): 2'-hydroxy corresponding base
  modified_base (8)..(8): 2'-hydroxy corresponding base
  modified_base (9)..(9): 2'-hydroxy corresponding base
  modified_base (10)..(10): 2'-hydroxy corresponding base
  modified_base (11)..(11): 2'-hydroxy corresponding base
  modified_base (12)..(12): 2'-hydroxy corresponding base
  modified_base (13)..(13): 2'-hydroxy corresponding base
  modified_base (14)..(14): 2'-hydroxy corresponding base
  modified_base (15)..(15): 2'-hydroxy corresponding base
  modified_base (16)..(16): 2'-hydroxy corresponding base
  modified_base (17)..(17): 2'-hydroxy corresponding base
  modified_base (18)..(18): 2'-hydroxy corresponding base
  modified_base (19)..(19): 2'-hydroxy corresponding base
  modified_base (20)..(20): deoxythymidine
  modified_base (21)..(21): deoxythymidine
cauucaaacaggucgagcutt

SEQ ID NO: 852 - DNA, 21 bp, Artificial Sequence
  Description of Artificial Sequence: Synthetic oligonucleotide
  Description of Combined DNA/RNA Molecule: Synthetic oligonucleotide
  siRNAs to PCSK9
  modified_base (1)..(1): 2'-hydroxy corresponding base
  modified_base (2)..(2): 2'-hydroxy corresponding base
  modified_base (3)..(3): 2'-hydroxy corresponding base
  modified_base (4)..(4): 2'-hydroxy corresponding base
  modified_base (5)..(5): 2'-hydroxy corresponding base
  modified_base (6)..(6): 2'-hydroxy corresponding base
  modified_base (7)..(7): 2'-hydroxy corresponding base
  modified_base (8)..(8): 2'-hydroxy corresponding base
  modified_base (9)..(9): 2'-hydroxy corresponding base
  modified_base (10)..(10): 2'-hydroxy corresponding base
  modified_base (11)..(11): 2'-hydroxy corresponding base
  modified_base (12)..(12): 2'-hydroxy corresponding base
  modified_base (13)..(13): 2'-hydroxy corresponding base
  modified_base (14)..(14): 2'-hydroxy corresponding base
  modified_base (15)..(15): 2'-hydroxy corresponding base
  modified_base (16)..(16): 2'-hydroxy corresponding base
  modified_base (17)..(17): 2'-hydroxy corresponding base
  modified_base (18)..(18): 2'-hydroxy corresponding base
  modified_base (19)..(19): 2'-hydroxy corresponding base
  modified_base (20)..(20): deoxythymidine
  modified_base (21)..(21): deoxythymidine
agcucgaccuguuugaaugtt

SEQ ID NO: 853 - DNA, 21 bp, Artificial Sequence
  Description of Artificial Sequence: Synthetic oligonucleotide
  Description of Combined DNA/RNA Molecule: Synthetic oligonucleotide
  siRNAs to PCSK9
  modified_base (1)..(1): 2'-hydroxy corresponding base
  modified_base (2)..(2): 2'-hydroxy corresponding base
  modified_base (3)..(3): 2'-hydroxy corresponding base
  modified_base (4)..(4): 2'-hydroxy corresponding base
  modified_base (5)..(5): 2'-hydroxy corresponding base
  modified_base (6)..(6): 2'-hydroxy corresponding base
  modified_base (7)..(7): 2'-hydroxy corresponding base
  modified_base (8)..(8): 2'-hydroxy corresponding base
  modified_base (9)..(9): 2'-hydroxy corresponding base
  modified_base (10)..(10): 2'-hydroxy corresponding base
  modified_base (11)..(11): 2'-hydroxy corresponding base
  modified_base (12)..(12): 2'-hydroxy corresponding base
  modified_base (13)..(13): 2'-hydroxy corresponding base
  modified_base (14)..(14): 2'-hydroxy corresponding base
  modified_base (15)..(15): 2'-hydroxy corresponding base
  modified_base (16)..(16): 2'-hydroxy corresponding base
  modified_base (17)..(17): 2'-hydroxy corresponding base
  modified_base (18)..(18): 2'-hydroxy corresponding base
  modified_base (19)..(19): 2'-hydroxy corresponding base
  modified_base (20)..(20): deoxythymidine
  modified_base (21)..(21): deoxythymidine
auucaaacaggucgagcugtt

SEQ ID NO: 854 - DNA, 21 bp, Artificial Sequence
  Description of Artificial Sequence: Synthetic oligonucleotide
  Description of Combined DNA/RNA Molecule: Synthetic oligonucleotide
  siRNAs to PCSK9
  modified_base (1)..(1): 2'-hydroxy corresponding base
  modified_base (2)..(2): 2'-hydroxy corresponding base
  modified_base (3)..(3): 2'-hydroxy corresponding base
  modified_base (4)..(4): 2'-hydroxy corresponding base
  modified_base (5)..(5): 2'-hydroxy corresponding base
  modified_base (6)..(6): 2'-hydroxy corresponding base
  modified_base (7)..(7): 2'-hydroxy corresponding base
  modified_base (8)..(8): 2'-hydroxy corresponding base
  modified_base (9)..(9): 2'-hydroxy corresponding base
  modified_base (10)..(10): 2'-hydroxy corresponding base
  modified_base (11)..(11): 2'-hydroxy corresponding base
  modified_base (12)..(12): 2'-hydroxy corresponding base
  modified_base (13)..(13): 2'-hydroxy corresponding base
  modified_base (14)..(14): 2'-hydroxy corresponding base
  modified_base (15)..(15): 2'-hydroxy corresponding base
  modified_base (16)..(16): 2'-hydroxy corresponding base
  modified_base (17)..(17): 2'-hydroxy corresponding base
  modified_base (18)..(18): 2'-hydroxy corresponding base
  modified_base (19)..(19): 2'-hydroxy corresponding base
  modified_base (20)..(20): deoxythymidine
  modified_base (21)..(21): deoxythymidine
cagcucgaccuguuugaautt

SEQ ID NO: 855 - DNA, 21 bp, Artificial Sequence
  Description of Artificial Sequence: Synthetic oligonucleotide
  Description of Combined DNA/RNA Molecule: Synthetic oligonucleotide
  siRNAs to PCSK9
  modified_base (1)..(1): 2'-hydroxy corresponding base
  modified_base (2)..(2): 2'-hydroxy corresponding base
  modified_base (3)..(3): 2'-hydroxy corresponding base
  modified_base (4)..(4): 2'-hydroxy corresponding base
  modified_base (5)..(5): 2'-hydroxy corresponding base
  modified_base (6)..(6): 2'-hydroxy corresponding base
  modified_base (7)..(7): 2'-hydroxy corresponding base
  modified_base (8)..(8): 2'-hydroxy corresponding base
  modified_base (9)..(9): 2'-hydroxy corresponding base
  modified_base (10)..(10): 2'-hydroxy corresponding base
  modified_base (11)..(11): 2'-hydroxy corresponding base
  modified_base (12)..(12): 2'-hydroxy corresponding base
  modified_base (13)..(13): 2'-hydroxy corresponding base
  modified_base (14)..(14): 2'-hydroxy corresponding base
  modified_base (15)..(15): 2'-hydroxy corresponding base
  modified_base (16)..(16): 2'-hydroxy corresponding base
  modified_base (17)..(17): 2'-hydroxy corresponding base
  modified_base (18)..(18): 2'-hydroxy corresponding base
  modified_base (19)..(19): 2'-hydroxy corresponding base
  modified_base (20)..(20): deoxythymidine
  modified_base (21)..(21): deoxythymidine
uucaaacaggucgagcugutt

SEQ ID NO: 856 - DNA, 21 bp, Artificial Sequence
  Description of Artificial Sequence: Synthetic oligonucleotide
  Description of Combined DNA/RNA Molecule: Synthetic oligonucleotide
  siRNAs to PCSK9
  modified_base (1)..(1): 2'-hydroxy corresponding base
  modified_base (2)..(2): 2'-hydroxy corresponding base
  modified_base (3)..(3): 2'-hydroxy corresponding base
  modified_base (4)..(4): 2'-hydroxy corresponding base
  modified_base (5)..(5): 2'-hydroxy corresponding base
  modified_base (6)..(6): 2'-hydroxy corresponding base
  modified_base (7)..(7): 2'-hydroxy corresponding base
  modified_base (8)..(8): 2'-hydroxy corresponding base
  modified_base (9)..(9): 2'-hydroxy corresponding base
  modified_base (10)..(10): 2'-hydroxy corresponding base
  modified_base (11)..(11): 2'-hydroxy corresponding base
  modified_base (12)..(12): 2'-hydroxy corresponding base
  modified_base (13)..(13): 2'-hydroxy corresponding base
  modified_base (14)..(14): 2'-hydroxy corresponding base
  modified_base (15)..(15): 2'-hydroxy corresponding base
  modified_base (16)..(16): 2'-hydroxy corresponding base
  modified_base (17)..(17): 2'-hydroxy corresponding base
  modified_base (18)..(18): 2'-hydroxy corresponding base
  modified_base (19)..(19): 2'-hydroxy corresponding base
  modified_base (20)..(20): deoxythymidine
  modified_base (21)..(21): deoxythymidine
acagcucgaccuguuugaatt

SEQ ID NO: 857 - DNA, 21 bp, Artificial Sequence
  Description of Artificial Sequence: Synthetic oligonucleotide
  Description of Combined DNA/RNA Molecule: Synthetic oligonucleotide
  siRNAs to PCSK9
  modified_base (1)..(1): 2'-hydroxy corresponding base
  modified_base (2)..(2): 2'-hydroxy corresponding base
  modified_base (3)..(3): 2'-hydroxy corresponding base
  modified_base (4)..(4): 2'-hydroxy corresponding base
  modified_base (5)..(5): 2'-hydroxy corresponding base
  modified_base (6)..(6): 2'-hydroxy corresponding base
  modified_base (7)..(7): 2'-hydroxy corresponding base
  modified_base (8)..(8): 2'-hydroxy corresponding base
  modified_base (9)..(9): 2'-hydroxy corresponding base
  modified_base (10)..(10): 2'-hydroxy corresponding base
  modified_base (11)..(11): 2'-hydroxy corresponding base
  modified_base (12)..(12): 2'-hydroxy corresponding base
  modified_base (13)..(13): 2'-hydroxy corresponding base
  modified_base (14)..(14): 2'-hydroxy corresponding base
  modified_base (15)..(15): 2'-hydroxy corresponding base
  modified_base (16)..(16): 2'-hydroxy corresponding base
  modified_base (17)..(17): 2'-hydroxy corresponding base
  modified_base (18)..(18): 2'-hydroxy corresponding base
  modified_base (19)..(19): 2'-hydroxy corresponding base
  modified_base (20)..(20): deoxythymidine
  modified_base (21)..(21): deoxythymidine
ucaaacaggucgagcugugtt

SEQ ID NO: 858 - DNA, 21 bp, Artificial Sequence
  Description of Artificial Sequence: Synthetic oligonucleotide
  Description of Combined DNA/RNA Molecule: Synthetic oligonucleotide
  siRNAs to PCSK9
  modified_base (1)..(1): 2'-hydroxy corresponding base
  modified_base (2)..(2): 2'-hydroxy corresponding base
  modified_base (3)..(3): 2'-hydroxy corresponding base
  modified_base (4)..(4): 2'-hydroxy corresponding base
  modified_base (5)..(5): 2'-hydroxy corresponding base
  modified_base (6)..(6): 2'-hydroxy corresponding base
  modified_base (7)..(7): 2'-hydroxy corresponding base
  modified_base (8)..(8): 2'-hydroxy corresponding base
  modified_base (9)..(9): 2'-hydroxy corresponding base
  modified_base (10)..(10): 2'-hydroxy corresponding base
  modified_base (11)..(11): 2'-hydroxy corresponding base
  modified_base (12)..(12): 2'-hydroxy corresponding base
  modified_base (13)..(13): 2'-hydroxy corresponding base
  modified_base (14)..(14): 2'-hydroxy corresponding base
  modified_base (15)..(15): 2'-hydroxy corresponding base
  modified_base (16)..(16): 2'-hydroxy corresponding base
  modified_base (17)..(17): 2'-hydroxy corresponding base
  modified_base (18)..(18): 2'-hydroxy corresponding base
  modified_base (19)..(19): 2'-hydroxy corresponding base
  modified_base (20)..(20): deoxythymidine
  modified_base (21)..(21): deoxythymidine
cacagcucgaccuguuugatt

SEQ ID NO: 859 - DNA, 21 bp, Artificial Sequence
  Description of Artificial Sequence: Synthetic oligonucleotide
  Description of Combined DNA/RNA Molecule: Synthetic oligonucleotide
  siRNAs to PCSK9
  modified_base (1)..(1): 2'-hydroxy corresponding base
  modified_base (2)..(2): 2'-hydroxy corresponding base
  modified_base (3)..(3): 2'-hydroxy corresponding base
  modified_base (4)..(4): 2'-hydroxy corresponding base
  modified_base (5)..(5): 2'-hydroxy corresponding base
  modified_base (6)..(6): 2'-hydroxy corresponding base
  modified_base (7)..(7): 2'-hydroxy corresponding base
  modified_base (8)..(8): 2'-hydroxy corresponding base
  modified_base (9)..(9): 2'-hydroxy corresponding base
  modified_base (10)..(10): 2'-hydroxy corresponding base
  modified_base (11)..(11): 2'-hydroxy corresponding base
  modified_base (12)..(12): 2'-hydroxy corresponding base
  modified_base (13)..(13): 2'-hydroxy corresponding base
  modified_base (14)..(14): 2'-hydroxy corresponding base
  modified_base (15)..(15): 2'-hydroxy corresponding base
  modified_base (16)..(16): 2'-hydroxy corresponding base
  modified_base (17)..(17): 2'-hydroxy corresponding base
  modified_base (18)..(18): 2'-hydroxy corresponding base
  modified_base (19)..(19): 2'-hydroxy corresponding base
  modified_base (20)..(20): deoxythymidine
  modified_base (21)..(21): deoxythymidine
caaacaggucgagcugugctt

SEQ ID NO: 860 - DNA, 21 bp, Artificial Sequence
  Description of Artificial Sequence: Synthetic oligonucleotide
  Description of Combined DNA/RNA Molecule: Synthetic oligonucleotide
  siRNAs to PCSK9
  modified_base (1)..(1): 2'-hydroxy corresponding base
  modified_base (2)..(2): 2'-hydroxy corresponding base
  modified_base (3)..(3): 2'-hydroxy corresponding base
  modified_base (4)..(4): 2'-hydroxy corresponding base
  modified_base (5)..(5): 2'-hydroxy corresponding base
  modified_base (6)..(6): 2'-hydroxy corresponding base
  modified_base (7)..(7): 2'-hydroxy corresponding base
  modified_base (8)..(8): 2'-hydroxy corresponding base
  modified_base (9)..(9): 2'-hydroxy corresponding base
  modified_base (10)..(10): 2'-hydroxy corresponding base
  modified_base (11)..(11): 2'-hydroxy corresponding base
  modified_base (12)..(12): 2'-hydroxy corresponding base
  modified_base (13)..(13): 2'-hydroxy corresponding base
  modified_base (14)..(14): 2'-hydroxy corresponding base
  modified_base (15)..(15): 2'-hydroxy corresponding base
  modified_base (16)..(16): 2'-hydroxy corresponding base
  modified_base (17)..(17): 2'-hydroxy corresponding base
  modified_base (18)..(18): 2'-hydroxy corresponding base
  modified_base (19)..(19): 2'-hydroxy corresponding base
  modified_base (20)..(20): deoxythymidine
  modified_base (21)..(21): deoxythymidine
gcacagcucgaccuguuugtt

SEQ ID NO: 861 - DNA, 21 bp, Artificial Sequence
  Description of Artificial Sequence: Synthetic oligonucleotide
  Description of Combined DNA/RNA Molecule: Synthetic oligonucleotide
  siRNAs to PCSK9
  modified_base (1)..(1): 2'-hydroxy corresponding base
  modified_base (2)..(2): 2'-hydroxy corresponding base
  modified_base (3)..(3): 2'-hydroxy corresponding base
  modified_base (4)..(4): 2'-hydroxy corresponding base
  modified_base (5)..(5): 2'-hydroxy corresponding base
  modified_base (6)..(6): 2'-hydroxy corresponding base
  modified_base (7)..(7): 2'-hydroxy corresponding base
  modified_base (8)..(8): 2'-hydroxy corresponding base
  modified_base (9)..(9): 2'-hydroxy corresponding base
  modified_base (10)..(10): 2'-hydroxy corresponding base
  modified_base (11)..(11): 2'-hydroxy corresponding base
  modified_base (12)..(12): 2'-hydroxy corresponding base
  modified_base (13)..(13): 2'-hydroxy corresponding base
  modified_base (14)..(14): 2'-hydroxy corresponding base
  modified_base (15)..(15): 2'-hydroxy corresponding base
  modified_base (16)..(16): 2'-hydroxy corresponding base
  modified_base (17)..(17): 2'-hydroxy corresponding base
  modified_base (18)..(18): 2'-hydroxy corresponding base
  modified_base (19)..(19): 2'-hydroxy corresponding base
  modified_base (20)..(20): deoxythymidine
  modified_base (21)..(21): deoxythymidine
aaacaggucgagcugugcutt

SEQ ID NO: 862 - DNA, 21 bp, Artificial Sequence
  Description of Artificial Sequence: Synthetic oligonucleotide
  Description of Combined DNA/RNA Molecule: Synthetic oligonucleotide
  siRNAs to PCSK9
  modified_base (1)..(1): 2'-hydroxy corresponding base
  modified_base (2)..(2): 2'-hydroxy corresponding base
  modified_base (3)..(3): 2'-hydroxy corresponding base
  modified_base (4)..(4): 2'-hydroxy corresponding base
  modified_base (5)..(5): 2'-hydroxy corresponding base
  modified_base (6)..(6): 2'-hydroxy corresponding base
  modified_base (7)..(7): 2'-hydroxy corresponding base
  modified_base (8)..(8): 2'-hydroxy corresponding base
  modified_base (9)..(9): 2'-hydroxy corresponding base
  modified_base (10)..(10): 2'-hydroxy corresponding base
  modified_base (11)..(11): 2'-hydroxy corresponding base
  modified_base (12)..(12): 2'-hydroxy corresponding base
  modified_base (13)..(13): 2'-hydroxy corresponding base
  modified_base (14)..(14): 2'-hydroxy corresponding base
  modified_base (15)..(15): 2'-hydroxy corresponding base
  modified_base (16)..(16): 2'-hydroxy corresponding base
  modified_base (17)..(17): 2'-hydroxy corresponding base
  modified_base (18)..(18): 2'-hydroxy corresponding base
  modified_base (19)..(19): 2'-hydroxy corresponding base
  modified_base (20)..(20): deoxythymidine
  modified_base (21)..(21): deoxythymidine
agcacagcucgaccuguuutt

SEQ ID NO: 863 - DNA, 21 bp, Artificial Sequence
  Description of Artificial Sequence: Synthetic oligonucleotide
  Description of Combined DNA/RNA Molecule: Synthetic oligonucleotide
  siRNAs to PCSK9
  modified_base (1)..(1): 2'-hydroxy corresponding base
  modified_base (2)..(2): 2'-hydroxy corresponding base
  modified_base (3)..(3): 2'-hydroxy corresponding base
  modified_base (4)..(4): 2'-hydroxy corresponding base
  modified_base (5)..(5): 2'-hydroxy corresponding base
  modified_base (6)..(6): 2'-hydroxy corresponding base
  modified_base (7)..(7): 2'-hydroxy corresponding base
  modified_base (8)..(8): 2'-hydroxy corresponding base
  modified_base (9)..(9): 2'-hydroxy corresponding base
  modified_base (10)..(10): 2'-hydroxy corresponding base
  modified_base (11)..(11): 2'-hydroxy corresponding base
  modified_base (12)..(12): 2'-hydroxy corresponding base
  modified_base (13)..(13): 2'-hydroxy corresponding base
  modified_base (14)..(14): 2'-hydroxy corresponding base
  modified_base (15)..(15): 2'-hydroxy corresponding base
  modified_base (16)..(16): 2'-hydroxy corresponding base
  modified_base (17)..(17): 2'-hydroxy corresponding base
  modified_base (18)..(18): 2'-hydroxy corresponding base
  modified_base (19)..(19): 2'-hydroxy corresponding base
  modified_base (20)..(20): deoxythymidine
  modified_base (21)..(21): deoxythymidine
aacaggucgagcugugcuctt

SEQ ID NO: 864 - DNA, 21 bp, Artificial Sequence
  Description of Artificial Sequence: Synthetic oligonucleotide
  Description of Combined DNA/RNA Molecule: Synthetic oligonucleotide
  siRNAs to PCSK9
  modified_base (1)..(1): 2'-hydroxy corresponding base
  modified_base (2)..(2): 2'-hydroxy corresponding base
  modified_base (3)..(3): 2'-hydroxy corresponding base
  modified_base (4)..(4): 2'-hydroxy corresponding base
  modified_base (5)..(5): 2'-hydroxy corresponding base
  modified_base (6)..(6): 2'-hydroxy corresponding base
  modified_base (7)..(7): 2'-hydroxy corresponding base
  modified_base (8)..(8): 2'-hydroxy corresponding base
  modified_base (9)..(9): 2'-hydroxy corresponding base
  modified_base (10)..(10): 2'-hydroxy corresponding base
  modified_base (11)..(11): 2'-hydroxy corresponding base
  modified_base (12)..(12): 2'-hydroxy corresponding base
  modified_base (13)..(13): 2'-hydroxy corresponding base
  modified_base (14)..(14): 2'-hydroxy corresponding base
  modified_base (15)..(15): 2'-hydroxy corresponding base
  modified_base (16)..(16): 2'-hydroxy corresponding base
  modified_base (17)..(17): 2'-hydroxy corresponding base
  modified_base (18)..(18): 2'-hydroxy corresponding base
  modified_base (19)..(19): 2'-hydroxy corresponding base
  modified_base (20)..(20): deoxythymidine
  modified_base (21)..(21): deoxythymidine
gagcacagcucgaccuguutt

SEQ ID NO: 865 - DNA, 21 bp, Artificial Sequence
  Description of Artificial Sequence: Synthetic oligonucleotide
  Description of Combined DNA/RNA Molecule: Synthetic oligonucleotide
  siRNAs to PCSK9
  modified_base (1)..(1): 2'-hydroxy corresponding base
  modified_base (2)..(2): 2'-hydroxy corresponding base
  modified_base (3)..(3): 2'-hydroxy corresponding base
  modified_base (4)..(4): 2'-hydroxy corresponding base
  modified_base (5)..(5): 2'-hydroxy corresponding base
  modified_base (6)..(6): 2'-hydroxy corresponding base
  modified_base (7)..(7): 2'-hydroxy corresponding base
  modified_base (8)..(8): 2'-hydroxy corresponding base
  modified_base (9)..(9): 2'-hydroxy corresponding base
  modified_base (10)..(10): 2'-hydroxy corresponding base
  modified_base (11)..(11): 2'-hydroxy corresponding base
  modified_base (12)..(12): 2'-hydroxy corresponding base
  modified_base (13)..(13): 2'-hydroxy corresponding base
  modified_base (14)..(14): 2'-hydroxy corresponding base
  modified_base (15)..(15): 2'-hydroxy corresponding base
  modified_base (16)..(16): 2'-hydroxy corresponding base
  modified_base (17)..(17): 2'-hydroxy corresponding base
  modified_base (18)..(18): 2'-hydroxy corresponding base
  modified_base (19)..(19): 2'-hydroxy corresponding base
  modified_base (20)..(20): deoxythymidine
  modified_base (21)..(21): deoxythymidine
caggucgagcugugcucggtt

SEQ ID NO: 866 - DNA, 21 bp, Artificial Sequence
  Description of Artificial Sequence: Synthetic oligonucleotide
  Description of Combined DNA/RNA Molecule: Synthetic oligonucleotide
  siRNAs to PCSK9
  modified_base (1)..(1): 2'-hydroxy corresponding base
  modified_base (2)..(2): 2'-hydroxy corresponding base
  modified_base (3)..(3): 2'-hydroxy corresponding base
  modified_base (4)..(4): 2'-hydroxy corresponding base
  modified_base (5)..(5): 2'-hydroxy corresponding base
  modified_base (6)..(6): 2'-hydroxy corresponding base
  modified_base (7)..(7): 2'-hydroxy corresponding base
  modified_base (8)..(8): 2'-hydroxy corresponding base
  modified_base (9)..(9): 2'-hydroxy corresponding base
  modified_base (10)..(10): 2'-hydroxy corresponding base
  modified_base (11)..(11): 2'-hydroxy corresponding base
  modified_base (12)..(12): 2'-hydroxy corresponding base
  modified_base (13)..(13): 2'-hydroxy corresponding base
  modified_base (14)..(14): 2'-hydroxy corresponding base
  modified_base (15)..(15): 2'-hydroxy corresponding base
  modified_base (16)..(16): 2'-hydroxy corresponding base
  modified_base (17)..(17): 2'-hydroxy corresponding base
  modified_base (18)..(18): 2'-hydroxy corresponding base
  modified_base (19)..(19): 2'-hydroxy corresponding base
  modified_base (20)..(20): deoxythymidine
  modified_base (21)..(21): deoxythymidine
ccgagcacagcucgaccugtt

SEQ ID NO: 867 - DNA, 21 bp, Artificial Sequence
  Description of Artificial Sequence: Synthetic oligonucleotide
  Description of Combined DNA/RNA Molecule: Synthetic oligonucleotide
  siRNAs to PCSK9
  modified_base (1)..(1): 2'-hydroxy corresponding base
  modified_base (2)..(2): 2'-hydroxy corresponding base
  modified_base (3)..(3): 2'-hydroxy corresponding base
  modified_base (4)..(4): 2'-hydroxy corresponding base
  modified_base (5)..(5): 2'-hydroxy corresponding base
  modified_base (6)..(6): 2'-hydroxy corresponding base
  modified_base (7)..(7): 2'-hydroxy corresponding base
  modified_base (8)..(8): 2'-hydroxy corresponding base
  modified_base (9)..(9): 2'-hydroxy corresponding base
  modified_base (10)..(10): 2'-hydroxy corresponding base
  modified_base (11)..(11): 2'-hydroxy corresponding base
  modified_base (12)..(12): 2'-hydroxy corresponding base
  modified_base (13)..(13): 2'-hydroxy corresponding base
  modified_base (14)..(14): 2'-hydroxy corresponding base
  modified_base (15)..(15): 2'-hydroxy corresponding base
  modified_base (16)..(16): 2'-hydroxy corresponding base
  modified_base (17)..(17): 2'-hydroxy corresponding base
  modified_base (18)..(18): 2'-hydroxy corresponding base
  modified_base (19)..(19): 2'-hydroxy corresponding base
  modified_base (20)..(20): deoxythymidine
  modified_base (21)..(21): deoxythymidine
aggucgagcugugcucgggtt

SEQ ID NO: 868 - DNA, 21 bp, Artificial Sequence
  Description of Artificial Sequence: Synthetic oligonucleotide
  Description of Combined DNA/RNA Molecule: Synthetic oligonucleotide
  siRNAs to PCSK9
  modified_base (1)..(1): 2'-hydroxy corresponding base
  modified_base (2)..(2): 2'-hydroxy corresponding base
  modified_base (3)..(3): 2'-hydroxy corresponding base
  modified_base (4)..(4): 2'-hydroxy corresponding base
  modified_base (5)..(5): 2'-hydroxy corresponding base
  modified_base (6)..(6): 2'-hydroxy corresponding base
  modified_base (7)..(7): 2'-hydroxy corresponding base
  modified_base (8)..(8): 2'-hydroxy corresponding base
  modified_base (9)..(9): 2'-hydroxy corresponding base
  modified_base (10)..(10): 2'-hydroxy corresponding base
  modified_base (11)..(11): 2'-hydroxy corresponding base
  modified_base (12)..(12): 2'-hydroxy corresponding base
  modified_base (13)..(13): 2'-hydroxy corresponding base
  modified_base (14)..(14): 2'-hydroxy corresponding base
  modified_base (15)..(15): 2'-hydroxy corresponding base
  modified_base (16)..(16): 2'-hydroxy corresponding base
  modified_base (17)..(17): 2'-hydroxy corresponding base
  modified_base (18)..(18): 2'-hydroxy corresponding base
  modified_base (19)..(19): 2'-hydroxy corresponding base
  modified_base (20)..(20): deoxythymidine
  modified_base (21)..(21): deoxythymidine
cccgagcacagcucgaccutt

SEQ ID NO: 869 - DNA, 21 bp, Artificial Sequence
  Description of Artificial Sequence: Synthetic oligonucleotide
  Description of Combined DNA/RNA Molecule: Synthetic oligonucleotide
  siRNAs to PCSK9
  modified_base (1)..(1): 2'-hydroxy corresponding base
  modified_base (2)..(2): 2'-hydroxy corresponding base
  modified_base (3)..(3): 2'-hydroxy corresponding base
  modified_base (4)..(4): 2'-hydroxy corresponding base
  modified_base (5)..(5): 2'-hydroxy corresponding base
  modified_base (6)..(6): 2'-hydroxy corresponding base
  modified_base (7)..(7): 2'-hydroxy corresponding base
  modified_base (8)..(8): 2'-hydroxy corresponding base
  modified_base (9)..(9): 2'-hydroxy corresponding base
  modified_base (10)..(10): 2'-hydroxy corresponding base
  modified_base (11)..(11): 2'-hydroxy corresponding base
  modified_base (12)..(12): 2'-hydroxy corresponding base
  modified_base (13)..(13): 2'-hydroxy corresponding base
  modified_base (14)..(14): 2'-hydroxy corresponding base
  modified_base (15)..(15): 2'-hydroxy corresponding base
  modified_base (16)..(16): 2'-hydroxy corresponding base
  modified_base (17)..(17): 2'-hydroxy corresponding base
  modified_base (18)..(18): 2'-hydroxy corresponding base
  modified_base (19)..(19): 2'-hydroxy corresponding base
  modified_base (20)..(20): deoxythymidine
  modified_base (21)..(21): deoxythymidine
gucgagcugugcucgggugtt

SEQ ID NO: 870 - DNA, 21 bp, Artificial Sequence
  Description of Artificial Sequence: Synthetic oligonucleotide
  Description of Combined DNA/RNA Molecule: Synthetic oligonucleotide
  siRNAs to PCSK9
  modified_base (1)..(1): 2'-hydroxy corresponding base
  modified_base (2)..(2): 2'-hydroxy corresponding base
  modified_base (3)..(3): 2'-hydroxy corresponding base
  modified_base (4)..(4): 2'-hydroxy corresponding base
  modified_base (5)..(5): 2'-hydroxy corresponding base
  modified_base (6)..(6): 2'-hydroxy corresponding base
  modified_base (7)..(7): 2'-hydroxy corresponding base
  modified_base (8)..(8): 2'-hydroxy corresponding base
  modified_base (9)..(9): 2'-hydroxy corresponding base
  modified_base (10)..(10): 2'-hydroxy corresponding base
  modified_base (11)..(11): 2'-hydroxy corresponding base
  modified_base (12)..(12): 2'-hydroxy corresponding base
  modified_base (13)..(13): 2'-hydroxy corresponding base
  modified_base (14)..(14): 2'-hydroxy corresponding base
  modified_base (15)..(15): 2'-hydroxy corresponding base
  modified_base (16)..(16): 2'-hydroxy corresponding base
  modified_base (17)..(17): 2'-hydroxy corresponding base
  modified_base (18)..(18): 2'-hydroxy corresponding base
  modified_base (19)..(19): 2'-hydroxy corresponding base
  modified_base (20)..(20): deoxythymidine
  modified_base (21)..(21): deoxythymidine
cacccgagcacagcucgactt

SEQ ID NO: 871 - DNA, 21 bp, Artificial Sequence
  Description of Artificial Sequence: Synthetic oligonucleotide
  Description of Combined DNA/RNA Molecule: Synthetic oligonucleotide
  siRNAs to PCSK9
  modified_base (1)..(1): 2'-hydroxy corresponding base
  modified_base (2)..(2): 2'-hydroxy corresponding base
  modified_base (3)..(3): 2'-hydroxy corresponding base
  modified_base (4)..(4): 2'-hydroxy corresponding base
  modified_base (5)..(5): 2'-hydroxy corresponding base
  modified_base (6)..(6): 2'-hydroxy corresponding base
  modified_base (7)..(7): 2'-hydroxy corresponding base
  modified_base (8)..(8): 2'-hydroxy corresponding base
  modified_base (9)..(9): 2'-hydroxy corresponding base
  modified_base (10)..(10): 2'-hydroxy corresponding base
  modified_base (11)..(11): 2'-hydroxy corresponding base
  modified_base (12)..(12): 2'-hydroxy corresponding base
  modified_base (13)..(13): 2'-hydroxy corresponding base
  modified_base (14)..(14): 2'-hydroxy corresponding base
  modified_base (15)..(15): 2'-hydroxy corresponding base
  modified_base (16)..(16): 2'-hydroxy corresponding base
  modified_base (17)..(17): 2'-hydroxy corresponding base
  modified_base (18)..(18): 2'-hydroxy corresponding base
  modified_base (19)..(19): 2'-hydroxy corresponding base
  modified_base (20)..(20): deoxythymidine
  modified_base (21)..(21): deoxythymidine
ucgagcugugcucgggugctt

SEQ ID NO: 872 - DNA, 21 bp, Artificial Sequence
  Description of Artificial Sequence: Synthetic oligonucleotide
  Description of Combined DNA/RNA Molecule: Synthetic oligonucleotide
  siRNAs to PCSK9
  modified_base (1)..(1): 2'-hydroxy corresponding base
  modified_base (2)..(2): 2'-hydroxy corresponding base
  modified_base (3)..(3): 2'-hydroxy corresponding base
  modified_base (4)..(4): 2'-hydroxy corresponding base
  modified_base (5)..(5): 2'-hydroxy corresponding base
  modified_base (6)..(6): 2'-hydroxy corresponding base
  modified_base (7)..(7): 2'-hydroxy corresponding base
  modified_base (8)..(8): 2'-hydroxy corresponding base
  modified_base (9)..(9): 2'-hydroxy corresponding base
  modified_base (10)..(10): 2'-hydroxy corresponding base
  modified_base (11)..(11): 2'-hydroxy corresponding base
  modified_base (12)..(12): 2'-hydroxy corresponding base
  modified_base (13)..(13): 2'-hydroxy corresponding base
  modified_base (14)..(14): 2'-hydroxy corresponding base
  modified_base (15)..(15): 2'-hydroxy corresponding base
  modified_base (16)..(16): 2'-hydroxy corresponding base
  modified_base (17)..(17): 2'-hydroxy corresponding base
  modified_base (18)..(18): 2'-hydroxy corresponding base
  modified_base (19)..(19): 2'-hydroxy corresponding base
  modified_base (20)..(20): deoxythymidine
  modified_base (21)..(21): deoxythymidine
gcacccgagcacagcucgatt

SEQ ID NO: 873 - DNA, 21 bp, Artificial Sequence
  Description of Artificial Sequence: Synthetic oligonucleotide
  Description of Combined DNA/RNA Molecule: Synthetic oligonucleotide
  siRNAs to PCSK9
  modified_base (1)..(1): 2'-hydroxy corresponding base
  modified_base (2)..(2): 2'-hydroxy corresponding base
  modified_base (3)..(3): 2'-hydroxy corresponding base
  modified_base (4)..(4): 2'-hydroxy corresponding base
  modified_base (5)..(5): 2'-hydroxy corresponding base
  modified_base (6)..(6): 2'-hydroxy corresponding base
  modified_base (7)..(7): 2'-hydroxy corresponding base
  modified_base (8)..(8): 2'-hydroxy corresponding base
  modified_base (9)..(9): 2'-hydroxy corresponding base
  modified_base (10)..(10): 2'-hydroxy corresponding base
  modified_base (11)..(11): 2'-hydroxy corresponding base
  modified_base (12)..(12): 2'-hydroxy corresponding base
  modified_base (13)..(13): 2'-hydroxy corresponding base
  modified_base (14)..(14): 2'-hydroxy corresponding base
  modified_base (15)..(15): 2'-hydroxy corresponding base
  modified_base (16)..(16): 2'-hydroxy corresponding base
  modified_base (17)..(17): 2'-hydroxy corresponding base
  modified_base (18)..(18): 2'-hydroxy corresponding base
  modified_base (19)..(19): 2'-hydroxy corresponding base
  modified_base (20)..(20): deoxythymidine
  modified_base (21)..(21): deoxythymidine
agcugcucccaaugugccgtt

SEQ ID NO: 874 - DNA, 21 bp, Artificial Sequence
  Description of Artificial Sequence: Synthetic oligonucleotide
  Description of Combined DNA/RNA Molecule: Synthetic oligonucleotide
  siRNAs to PCSK9
  modified_base (1)..(1): 2'-hydroxy corresponding base
  modified_base (2)..(2): 2'-hydroxy corresponding base
  modified_base (3)..(3): 2'-hydroxy corresponding base
  modified_base (4)..(4): 2'-hydroxy corresponding base
  modified_base (5)..(5): 2'-hydroxy corresponding base
  modified_base (6)..(6): 2'-hydroxy corresponding base
  modified_base (7)..(7): 2'-hydroxy corresponding base
  modified_base (8)..(8): 2'-hydroxy corresponding base
  modified_base (9)..(9): 2'-hydroxy corresponding base
  modified_base (10)..(10): 2'-hydroxy corresponding base
  modified_base (11)..(11): 2'-hydroxy corresponding base
  modified_base (12)..(12): 2'-hydroxy corresponding base
  modified_base (13)..(13): 2'-hydroxy corresponding base
  modified_base (14)..(14): 2'-hydroxy corresponding base
  modified_base (15)..(15): 2'-hydroxy corresponding base
  modified_base (16)..(16): 2'-hydroxy corresponding base
  modified_base (17)..(17): 2'-hydroxy corresponding base
  modified_base (18)..(18): 2'-hydroxy corresponding base
  modified_base (19)..(19): 2'-hydroxy corresponding base
  modified_base (20)..(20): deoxythymidine
  modified_base (21)..(21): deoxythymidine
cggcacauugggagcagcutt

SEQ ID NO: 875 - DNA, 21 bp, Artificial Sequence
  Description of Artificial Sequence: Synthetic oligonucleotide
  Description of Combined DNA/RNA Molecule: Synthetic oligonucleotide
  siRNAs to PCSK9
  modified_base (1)..(1): 2'-hydroxy corresponding base
  modified_base (2)..(2): 2'-hydroxy corresponding base
  modified_base (3)..(3): 2'-hydroxy corresponding base
  modified_base (4)..(4): 2'-hydroxy corresponding base
  modified_base (5)..(5): 2'-hydroxy corresponding base
  modified_base (6)..(6): 2'-hydroxy corresponding base
  modified_base (7)..(7): 2'-hydroxy corresponding base
  modified_base (8)..(8): 2'-hydroxy corresponding base
  modified_base (9)..(9): 2'-hydroxy corresponding base
  modified_base (10)..(10): 2'-hydroxy corresponding base
  modified_base (11)..(11): 2'-hydroxy corresponding base
  modified_base (12)..(12): 2'-hydroxy corresponding base
  modified_base (13)..(13): 2'-hydroxy corresponding base
  modified_base (14)..(14): 2'-hydroxy corresponding base
  modified_base (15)..(15): 2'-hydroxy corresponding base
  modified_base (16)..(16): 2'-hydroxy corresponding base
  modified_base (17)..(17): 2'-hydroxy corresponding base
  modified_base (18)..(18): 2'-hydroxy corresponding base
  modified_base (19)..(19): 2'-hydroxy corresponding base
  modified_base (20)..(20): deoxythymidine
  modified_base (21)..(21): deoxythymidine
gcugcucccaaugugccgatt

SEQ ID NO: 876 - DNA, 21 bp, Artificial Sequence
  Description of Artificial Sequence: Synthetic oligonucleotide
  Description of Combined DNA/RNA Molecule: Synthetic oligonucleotide
  siRNAs to PCSK9
  modified_base (1)..(1): 2'-hydroxy corresponding base
  modified_base (2)..(2): 2'-hydroxy corresponding base
  modified_base (3)..(3): 2'-hydroxy corresponding base
  modified_base (4)..(4): 2'-hydroxy corresponding base
  modified_base (5)..(5): 2'-hydroxy corresponding base
  modified_base (6)..(6): 2'-hydroxy corresponding base
  modified_base (7)..(7): 2'-hydroxy corresponding base
  modified_base (8)..(8): 2'-hydroxy corresponding base
  modified_base (9)..(9): 2'-hydroxy corresponding base
  modified_base (10)..(10): 2'-hydroxy corresponding base
  modified_base (11)..(11): 2'-hydroxy corresponding base
  modified_base (12)..(12): 2'-hydroxy corresponding base
  modified_base (13)..(13): 2'-hydroxy corresponding base
  modified_base (14)..(14): 2'-hydroxy corresponding base
  modified_base (15)..(15): 2'-hydroxy corresponding base
  modified_base (16)..(16): 2'-hydroxy corresponding base
  modified_base (17)..(17): 2'-hydroxy corresponding base
  modified_base (18)..(18): 2'-hydroxy corresponding base
  modified_base (19)..(19): 2'-hydroxy corresponding base
  modified_base (20)..(20): deoxythymidine
  modified_base (21)..(21): deoxythymidine
ucggcacauugggagcagctt

SEQ ID NO: 877 - DNA, 21 bp, Artificial Sequence
  Description of Artificial Sequence: Synthetic oligonucleotide
  Description of Combined DNA/RNA Molecule: Synthetic oligonucleotide
  siRNAs to PCSK9
  modified_base (1)..(1): 2'-hydroxy corresponding base
  modified_base (2)..(2): 2'-hydroxy corresponding base
  modified_base (3)..(3): 2'-hydroxy corresponding base
  modified_base (4)..(4): 2'-hydroxy corresponding base
  modified_base (5)..(5): 2'-hydroxy corresponding base
  modified_base (6)..(6): 2'-hydroxy corresponding base
  modified_base (7)..(7): 2'-hydroxy corresponding base
  modified_base (8)..(8): 2'-hydroxy corresponding base
  modified_base (9)..(9): 2'-hydroxy corresponding base
  modified_base (10)..(10): 2'-hydroxy corresponding base
  modified_base (11)..(11): 2'-hydroxy corresponding base
  modified_base (12)..(12): 2'-hydroxy corresponding base
  modified_base (13)..(13): 2'-hydroxy corresponding base
  modified_base (14)..(14): 2'-hydroxy corresponding base
  modified_base (15)..(15): 2'-hydroxy corresponding base
  modified_base (16)..(16): 2'-hydroxy corresponding base
  modified_base (17)..(17): 2'-hydroxy corresponding base
  modified_base (18)..(18): 2'-hydroxy corresponding base
  modified_base (19)..(19): 2'-hydroxy corresponding base
  modified_base (20)..(20): deoxythymidine
  modified_base (21)..(21): deoxythymidine
ugcucccaaugugccgaugtt

SEQ ID NO: 878 - DNA, 21 bp, Artificial Sequence
  Description of Artificial Sequence: Synthetic oligonucleotide
  Description of Combined DNA/RNA Molecule: Synthetic oligonucleotide
  siRNAs to PCSK9
  modified_base (1)..(1): 2'-hydroxy corresponding base
  modified_base (2)..(2): 2'-hydroxy corresponding base
  modified_base (3)..(3): 2'-hydroxy corresponding base
  modified_base (4)..(4): 2'-hydroxy corresponding base
  modified_base (5)..(5): 2'-hydroxy corresponding base
  modified_base (6)..(6): 2'-hydroxy corresponding base
  modified_base (7)..(7): 2'-hydroxy corresponding base
  modified_base (8)..(8): 2'-hydroxy corresponding base
  modified_base (9)..(9): 2'-hydroxy corresponding base
  modified_base (10)..(10): 2'-hydroxy corresponding base
  modified_base (11)..(11): 2'-hydroxy corresponding base
  modified_base (12)..(12): 2'-hydroxy corresponding base
  modified_base (13)..(13): 2'-hydroxy corresponding base
  modified_base (14)..(14): 2'-hydroxy corresponding base
  modified_base (15)..(15): 2'-hydroxy corresponding base
  modified_base (16)..(16): 2'-hydroxy corresponding base
  modified_base (17)..(17): 2'-hydroxy corresponding base
  modified_base (18)..(18): 2'-hydroxy corresponding base
  modified_base (19)..(19): 2'-hydroxy corresponding base
  modified_base (20)..(20): deoxythymidine
  modified_base (21)..(21): deoxythymidine
caucggcacauugggagcatt

SEQ ID NO: 879 - DNA, 21 bp, Artificial Sequence
  Description of Artificial Sequence: Synthetic oligonucleotide
  Description of Combined DNA/RNA Molecule: Synthetic oligonucleotide
  siRNAs to PCSK9
  modified_base (1)..(1): 2'-hydroxy corresponding base
  modified_base (2)..(2): 2'-hydroxy corresponding base
  modified_base (3)..(3): 2'-hydroxy corresponding base
  modified_base (4)..(4): 2'-hydroxy corresponding base
  modified_base (5)..(5): 2'-hydroxy corresponding base
  modified_base (6)..(6): 2'-hydroxy corresponding base
  modified_base (7)..(7): 2'-hydroxy corresponding base
  modified_base (8)..(8): 2'-hydroxy corresponding base
  modified_base (9)..(9): 2'-hydroxy corresponding base
  modified_base (10)..(10): 2'-hydroxy corresponding base
  modified_base (11)..(11): 2'-hydroxy corresponding base
  modified_base (12)..(12): 2'-hydroxy corresponding base
  modified_base (13)..(13): 2'-hydroxy corresponding base
  modified_base (14)..(14): 2'-hydroxy corresponding base
  modified_base (15)..(15): 2'-hydroxy corresponding base
  modified_base (16)..(16): 2'-hydroxy corresponding base
  modified_base (17)..(17): 2'-hydroxy corresponding base
  modified_base (18)..(18): 2'-hydroxy corresponding base
  modified_base (19)..(19): 2'-hydroxy corresponding base
  modified_base (20)..(20): deoxythymidine
  modified_base (21)..(21): deoxythymidine
ucccaaugugccgaugucctt

SEQ ID NO: 880 - DNA, 21 bp, Artificial Sequence
  Description of Artificial Sequence: Synthetic oligonucleotide
  Description of Combined DNA/RNA Molecule: Synthetic oligonucleotide
  siRNAs to PCSK9
  modified_base (1)..(1): 2'-hydroxy corresponding base
  modified_base (2)..(2): 2'-hydroxy corresponding base
  modified_base (3)..(3): 2'-hydroxy corresponding base
  modified_base (4)..(4): 2'-hydroxy corresponding base
  modified_base (5)..(5): 2'-hydroxy corresponding base
  modified_base (6)..(6): 2'-hydroxy corresponding base
  modified_base (7)..(7): 2'-hydroxy corresponding base
  modified_base (8)..(8): 2'-hydroxy corresponding base
  modified_base (9)..(9): 2'-hydroxy corresponding base
  modified_base (10)..(10): 2'-hydroxy corresponding base
  modified_base (11)..(11): 2'-hydroxy corresponding base
  modified_base (12)..(12): 2'-hydroxy corresponding base
  modified_base (13)..(13): 2'-hydroxy corresponding base
  modified_base (14)..(14): 2'-hydroxy corresponding base
  modified_base (15)..(15): 2'-hydroxy corresponding base
  modified_base (16)..(16): 2'-hydroxy corresponding base
  modified_base (17)..(17): 2'-hydroxy corresponding base
  modified_base (18)..(18): 2'-hydroxy corresponding base
  modified_base (19)..(19): 2'-hydroxy corresponding base
  modified_base (20)..(20): deoxythymidine
  modified_base (21)..(21): deoxythymidine
ggacaucggcacauugggatt

SEQ ID NO: 881 - DNA, 21 bp, Artificial Sequence
  Description of Artificial Sequence: Synthetic oligonucleotide
  Description of Combined DNA/RNA Molecule: Synthetic oligonucleotide
  siRNAs to PCSK9
  modified_base (1)..(1): 2'-hydroxy corresponding base
  modified_base (2)..(2): 2'-hydroxy corresponding base
  modified_base (3)..(3): 2'-hydroxy corresponding base
  modified_base (4)..(4): 2'-hydroxy corresponding base
  modified_base (5)..(5): 2'-hydroxy corresponding base
  modified_base (6)..(6): 2'-hydroxy corresponding base
  modified_base (7)..(7): 2'-hydroxy corresponding base
  modified_base (8)..(8): 2'-hydroxy corresponding base
  modified_base (9)..(9): 2'-hydroxy corresponding base
  modified_base (10)..(10): 2'-hydroxy corresponding base
  modified_base (11)..(11): 2'-hydroxy corresponding base
  modified_base (12)..(12): 2'-hydroxy corresponding base
  modified_base (13)..(13): 2'-hydroxy corresponding base
  modified_base (14)..(14): 2'-hydroxy corresponding base
  modified_base (15)..(15): 2'-hydroxy corresponding base
  modified_base (16)..(16): 2'-hydroxy corresponding base
  modified_base (17)..(17): 2'-hydroxy corresponding base
  modified_base (18)..(18): 2'-hydroxy corresponding base
  modified_base (19)..(19): 2'-hydroxy corresponding base
  modified_base (20)..(20): deoxythymidine
  modified_base (21)..(21): deoxythymidine
ccaaugugccgauguccgutt

SEQ ID NO: 882 - DNA, 21 bp, Artificial Sequence
  Description of Artificial Sequence: Synthetic oligonucleotide
  Description of Combined DNA/RNA Molecule: Synthetic oligonucleotide
  siRNAs to PCSK9
  modified_base (1)..(1): 2'-hydroxy corresponding base
  modified_base (2)..(2): 2'-hydroxy corresponding base
  modified_base (3)..(3): 2'-hydroxy corresponding base
  modified_base (4)..(4): 2'-hydroxy corresponding base
  modified_base (5)..(5): 2'-hydroxy corresponding base
  modified_base (6)..(6): 2'-hydroxy corresponding base
  modified_base (7)..(7): 2'-hydroxy corresponding base
  modified_base (8)..(8): 2'-hydroxy corresponding base
  modified_base (9)..(9): 2'-hydroxy corresponding base
  modified_base (10)..(10): 2'-hydroxy corresponding base
  modified_base (11)..(11): 2'-hydroxy corresponding base
  modified_base (12)..(12): 2'-hydroxy corresponding base
  modified_base (13)..(13): 2'-hydroxy corresponding base
  modified_base (14)..(14): 2'-hydroxy corresponding base
  modified_base (15)..(15): 2'-hydroxy corresponding base
  modified_base (16)..(16): 2'-hydroxy corresponding base
  modified_base (17)..(17): 2'-hydroxy corresponding base
  modified_base (18)..(18): 2'-hydroxy corresponding base
  modified_base (19)..(19): 2'-hydroxy corresponding base
  modified_base (20)..(20): deoxythymidine
  modified_base (21)..(21): deoxythymidine
acggacaucggcacauuggtt

SEQ ID NO: 883 - DNA, 21 bp, Artificial Sequence
  Description of Artificial Sequence: Synthetic oligonucleotide
  Description of Combined DNA/RNA Molecule: Synthetic oligonucleotide
  siRNAs to PCSK9
  modified_base (1)..(1): 2'-hydroxy corresponding base
  modified_base (2)..(2): 2'-hydroxy corresponding base
  modified_base (3)..(3): 2'-hydroxy corresponding base
  modified_base (4)..(4): 2'-hydroxy corresponding base
  modified_base (5)..(5): 2'-hydroxy corresponding base
  modified_base (6)..(6): 2'-hydroxy corresponding base
  modified_base (7)..(7): 2'-hydroxy corresponding base
  modified_base (8)..(8): 2'-hydroxy corresponding base
  modified_base (9)..(9): 2'-hydroxy corresponding base
  modified_base (10)..(10): 2'-hydroxy corresponding base
  modified_base (11)..(11): 2'-hydroxy corresponding base
  modified_base (12)..(12): 2'-hydroxy corresponding base
  modified_base (13)..(13): 2'-hydroxy corresponding base
  modified_base (14)..(14): 2'-hydroxy corresponding base
  modified_base (15)..(15): 2'-hydroxy corresponding base
  modified_base (16)..(16): 2'-hydroxy corresponding base
  modified_base (17)..(17): 2'-hydroxy corresponding base
  modified_base (18)..(18): 2'-hydroxy corresponding base
  modified_base (19)..(19): 2'-hydroxy corresponding base
  modified_base (20)..(20): deoxythymidine
  modified_base (21)..(21): deoxythymidine
caaugugccgauguccgugtt

SEQ ID NO: 884 - DNA, 21 bp, Artificial Sequence
  Description of Artificial Sequence: Synthetic oligonucleotide
  Description of Combined DNA/RNA Molecule: Synthetic oligonucleotide
  siRNAs to PCSK9
  modified_base (1)..(1): 2'-hydroxy corresponding base
  modified_base (2)..(2): 2'-hydroxy corresponding base
  modified_base (3)..(3): 2'-hydroxy corresponding base
  modified_base (4)..(4): 2'-hydroxy corresponding base
  modified_base (5)..(5): 2'-hydroxy corresponding base
  modified_base (6)..(6): 2'-hydroxy corresponding base
  modified_base (7)..(7): 2'-hydroxy corresponding base
  modified_base (8)..(8): 2'-hydroxy corresponding base
  modified_base (9)..(9): 2'-hydroxy corresponding base
  modified_base (10)..(10): 2'-hydroxy corresponding base
  modified_base (11)..(11): 2'-hydroxy corresponding base
  modified_base (12)..(12): 2'-hydroxy corresponding base
  modified_base (13)..(13): 2'-hydroxy corresponding base
  modified_base (14)..(14): 2'-hydroxy corresponding base
  modified_base (15)..(15): 2'-hydroxy corresponding base
  modified_base (16)..(16): 2'-hydroxy corresponding base
  modified_base (17)..(17): 2'-hydroxy corresponding base
  modified_base (18)..(18): 2'-hydroxy corresponding base
  modified_base (19)..(19): 2'-hydroxy corresponding base
  modified_base (20)..(20): deoxythymidine
  modified_base (21)..(21): deoxythymidine
cacggacaucggcacauugtt

SEQ ID NO: 885 - DNA, 21 bp, Artificial Sequence
  Description of Artificial Sequence: Synthetic oligonucleotide
  Description of Combined DNA/RNA Molecule: Synthetic oligonucleotide
  siRNAs to PCSK9
  modified_base (1)..(1): 2'-hydroxy corresponding base
  modified_base (2)..(2): 2'-hydroxy corresponding base
  modified_base (3)..(3): 2'-hydroxy corresponding base
  modified_base (4)..(4): 2'-hydroxy corresponding base
  modified_base (5)..(5): 2'-hydroxy corresponding base
  modified_base (6)..(6): 2'-hydroxy corresponding base
  modified_base (7)..(7): 2'-hydroxy corresponding base
  modified_base (8)..(8): 2'-hydroxy corresponding base
  modified_base (9)..(9): 2'-hydroxy corresponding base
  modified_base (10)..(10): 2'-hydroxy corresponding base
  modified_base (11)..(11): 2'-hydroxy corresponding base
  modified_base (12)..(12): 2'-hydroxy corresponding base
  modified_base (13)..(13): 2'-hydroxy corresponding base
  modified_base (14)..(14): 2'-hydroxy corresponding base
  modified_base (15)..(15): 2'-hydroxy corresponding base
  modified_base (16)..(16): 2'-hydroxy corresponding base
  modified_base (17)..(17): 2'-hydroxy corresponding base
  modified_base (18)..(18): 2'-hydroxy corresponding base
  modified_base (19)..(19): 2'-hydroxy corresponding base
  modified_base (20)..(20): deoxythymidine
  modified_base (21)..(21): deoxythymidine
aaugugccgauguccguggtt

SEQ ID NO: 886 - DNA, 21 bp, Artificial Sequence
  Description of Artificial Sequence: Synthetic oligonucleotide
  Description of Combined DNA/RNA Molecule: Synthetic oligonucleotide
  siRNAs to PCSK9
  modified_base (1)..(1): 2'-hydroxy corresponding base
  modified_base (2)..(2): 2'-hydroxy corresponding base
  modified_base (3)..(3): 2'-hydroxy corresponding base
  modified_base (4)..(4): 2'-hydroxy corresponding base
  modified_base (5)..(5): 2'-hydroxy corresponding base
  modified_base (6)..(6): 2'-hydroxy corresponding base
  modified_base (7)..(7): 2'-hydroxy corresponding base
  modified_base (8)..(8): 2'-hydroxy corresponding base
  modified_base (9)..(9): 2'-hydroxy corresponding base
  modified_base (10)..(10): 2'-hydroxy corresponding base
  modified_base (11)..(11): 2'-hydroxy corresponding base
  modified_base (12)..(12): 2'-hydroxy corresponding base
  modified_base (13)..(13): 2'-hydroxy corresponding base
  modified_base (14)..(14): 2'-hydroxy corresponding base
  modified_base (15)..(15): 2'-hydroxy corresponding base
  modified_base (16)..(16): 2'-hydroxy corresponding base
  modified_base (17)..(17): 2'-hydroxy corresponding base
  modified_base (18)..(18): 2'-hydroxy corresponding base
  modified_base (19)..(19): 2'-hydroxy corresponding base
  modified_base (20)..(20): deoxythymidine
  modified_base (21)..(21): deoxythymidine
ccacggacaucggcacauutt

SEQ ID NO: 887 - DNA, 21 bp, Artificial Sequence
  Description of Artificial Sequence: Synthetic oligonucleotide
  Description of Combined DNA/RNA Molecule: Synthetic oligonucleotide
  siRNAs to PCSK9
  modified_base (1)..(1): 2'-hydroxy corresponding base
  modified_base (2)..(2): 2'-hydroxy corresponding base
  modified_base (3)..(3): 2'-hydroxy corresponding base
  modified_base (4)..(4): 2'-hydroxy corresponding base
  modified_base (5)..(5): 2'-hydroxy corresponding base
  modified_base (6)..(6): 2'-hydroxy corresponding base
  modified_base (7)..(7): 2'-hydroxy corresponding base
  modified_base (8)..(8): 2'-hydroxy corresponding base
  modified_base (9)..(9): 2'-hydroxy corresponding base
  modified_base (10)..(10): 2'-hydroxy corresponding base
  modified_base (11)..(11): 2'-hydroxy corresponding base
  modified_base (12)..(12): 2'-hydroxy corresponding base
  modified_base (13)..(13): 2'-hydroxy corresponding base
  modified_base (14)..(14): 2'-hydroxy corresponding base
  modified_base (15)..(15): 2'-hydroxy corresponding base
  modified_base (16)..(16): 2'-hydroxy corresponding base
  modified_base (17)..(17): 2'-hydroxy corresponding base
  modified_base (18)..(18): 2'-hydroxy corresponding base
  modified_base (19)..(19): 2'-hydroxy corresponding base
  modified_base (20)..(20): deoxythymidine
  modified_base (21)..(21): deoxythymidine
ccgauguccgugggcagaatt

SEQ ID NO: 888 - DNA, 21 bp, Artificial Sequence
  Description of Artificial Sequence: Synthetic oligonucleotide
  Description of Combined DNA/RNA Molecule: Synthetic oligonucleotide
  siRNAs to PCSK9
  modified_base (1)..(1): 2'-hydroxy corresponding base
  modified_base (2)..(2): 2'-hydroxy corresponding base
  modified_base (3)..(3): 2'-hydroxy corresponding base
  modified_base (4)..(4): 2'-hydroxy corresponding base
  modified_base (5)..(5): 2'-hydroxy corresponding base
  modified_base (6)..(6): 2'-hydroxy corresponding base
  modified_base (7)..(7): 2'-hydroxy corresponding base
  modified_base (8)..(8): 2'-hydroxy corresponding base
  modified_base (9)..(9): 2'-hydroxy corresponding base
  modified_base (10)..(10): 2'-hydroxy corresponding base
  modified_base (11)..(11): 2'-hydroxy corresponding base
  modified_base (12)..(12): 2'-hydroxy corresponding base
  modified_base (13)..(13): 2'-hydroxy corresponding base
  modified_base (14)..(14): 2'-hydroxy corresponding base
  modified_base (15)..(15): 2'-hydroxy corresponding base
  modified_base (16)..(16): 2'-hydroxy corresponding base
  modified_base (17)..(17): 2'-hydroxy corresponding base
  modified_base (18)..(18): 2'-hydroxy corresponding base
  modified_base (19)..(19): 2'-hydroxy corresponding base
  modified_base (20)..(20): deoxythymidine
  modified_base (21)..(21): deoxythymidine
uucugcccacggacaucggtt

SEQ ID NO: 889 - DNA, 21 bp, Artificial Sequence
  Description of Artificial Sequence: Synthetic oligonucleotide
  Description of Combined DNA/RNA Molecule: Synthetic oligonucleotide
  siRNAs to PCSK9
  modified_base (1)..(1): 2'-hydroxy corresponding base
  modified_base (2)..(2): 2'-hydroxy corresponding base
  modified_base (3)..(3): 2'-hydroxy corresponding base
  modified_base (4)..(4): 2'-hydroxy corresponding base
  modified_base (5)..(5): 2'-hydroxy corresponding base
  modified_base (6)..(6): 2'-hydroxy corresponding base
  modified_base (7)..(7): 2'-hydroxy corresponding base
  modified_base (8)..(8): 2'-hydroxy corresponding base
  modified_base (9)..(9): 2'-hydroxy corresponding base
  modified_base (10)..(10): 2'-hydroxy corresponding base
  modified_base (11)..(11): 2'-hydroxy corresponding base
  modified_base (12)..(12): 2'-hydroxy corresponding base
  modified_base (13)..(13): 2'-hydroxy corresponding base
  modified_base (14)..(14): 2'-hydroxy corresponding base
  modified_base (15)..(15): 2'-hydroxy corresponding base
  modified_base (16)..(16): 2'-hydroxy corresponding base
  modified_base (17)..(17): 2'-hydroxy corresponding base
  modified_base (18)..(18): 2'-hydroxy corresponding base
  modified_base (19)..(19): 2'-hydroxy corresponding base
  modified_base (20)..(20): deoxythymidine
  modified_base (21)..(21): deoxythymidine
gauguccgugggcagaaugtt

SEQ ID NO: 890 - DNA, 21 bp, Artificial Sequence
  Description of Artificial Sequence: Synthetic oligonucleotide
  Description of Combined DNA/RNA Molecule: Synthetic oligonucleotide
  siRNAs to PCSK9
  modified_base (1)..(1): 2'-hydroxy corresponding base
  modified_base (2)..(2): 2'-hydroxy corresponding base
  modified_base (3)..(3): 2'-hydroxy corresponding base
  modified_base (4)..(4): 2'-hydroxy corresponding base
  modified_base (5)..(5): 2'-hydroxy corresponding base
  modified_base (6)..(6): 2'-hydroxy corresponding base
  modified_base (7)..(7): 2'-hydroxy corresponding base
  modified_base (8)..(8): 2'-hydroxy corresponding base
  modified_base (9)..(9): 2'-hydroxy corresponding base
  modified_base (10)..(10): 2'-hydroxy corresponding base
  modified_base (11)..(11): 2'-hydroxy corresponding base
  modified_base (12)..(12): 2'-hydroxy corresponding base
  modified_base (13)..(13): 2'-hydroxy corresponding base
  modified_base (14)..(14): 2'-hydroxy corresponding base
  modified_base (15)..(15): 2'-hydroxy corresponding base
  modified_base (16)..(16): 2'-hydroxy corresponding base
  modified_base (17)..(17): 2'-hydroxy corresponding base
  modified_base (18)..(18): 2'-hydroxy corresponding base
  modified_base (19)..(19): 2'-hydroxy corresponding base
  modified_base (20)..(20): deoxythymidine
  modified_base (21)..(21): deoxythymidine
cauucugcccacggacauctt

SEQ ID NO: 891 - DNA, 21 bp, Artificial Sequence
  Description of Artificial Sequence: Synthetic oligonucleotide
  Description of Combined DNA/RNA Molecule: Synthetic oligonucleotide
  siRNAs to PCSK9
  modified_base (1)..(1): 2'-hydroxy corresponding base
  modified_base (2)..(2): 2'-hydroxy corresponding base
  modified_base (3)..(3): 2'-hydroxy corresponding base
  modified_base (4)..(4): 2'-hydroxy corresponding base
  modified_base (5)..(5): 2'-hydroxy corresponding base
  modified_base (6)..(6): 2'-hydroxy corresponding base
  modified_base (7)..(7): 2'-hydroxy corresponding base
  modified_base (8)..(8): 2'-hydroxy corresponding base
  modified_base (9)..(9): 2'-hydroxy corresponding base
  modified_base (10)..(10): 2'-hydroxy corresponding base
  modified_base (11)..(11): 2'-hydroxy corresponding base
  modified_base (12)..(12): 2'-hydroxy corresponding base
  modified_base (13)..(13): 2'-hydroxy corresponding base
  modified_base (14)..(14): 2'-hydroxy corresponding base
  modified_base (15)..(15): 2'-hydroxy corresponding base
  modified_base (16)..(16): 2'-hydroxy corresponding base
  modified_base (17)..(17): 2'-hydroxy corresponding base
  modified_base (18)..(18): 2'-hydroxy corresponding base
  modified_base (19)..(19): 2'-hydroxy corresponding base
  modified_base (20)..(20): deoxythymidine
  modified_base (21)..(21): deoxythymidine
guccgugggcagaaugacutt

SEQ ID NO: 892 - DNA, 21 bp, Artificial Sequence
  Description of Artificial Sequence: Synthetic oligonucleotide
  Description of Combined DNA/RNA Molecule: Synthetic oligonucleotide
  siRNAs to PCSK9
  modified_base (1)..(1): 2'-hydroxy corresponding base
  modified_base (2)..(2): 2'-hydroxy corresponding base
  modified_base (3)..(3): 2'-hydroxy corresponding base
  modified_base (4)..(4): 2'-hydroxy corresponding base
  modified_base (5)..(5): 2'-hydroxy corresponding base
  modified_base (6)..(6): 2'-hydroxy corresponding base
  modified_base (7)..(7): 2'-hydroxy corresponding base
  modified_base (8)..(8): 2'-hydroxy corresponding base
  modified_base (9)..(9): 2'-hydroxy corresponding base
  modified_base (10)..(10): 2'-hydroxy corresponding base
  modified_base (11)..(11): 2'-hydroxy corresponding base
  modified_base (12)..(12): 2'-hydroxy corresponding base
  modified_base (13)..(13): 2'-hydroxy corresponding base
  modified_base (14)..(14): 2'-hydroxy corresponding base
  modified_base (15)..(15): 2'-hydroxy corresponding base
  modified_base (16)..(16): 2'-hydroxy corresponding base
  modified_base (17)..(17): 2'-hydroxy corresponding base
  modified_base (18)..(18): 2'-hydroxy corresponding base
  modified_base (19)..(19): 2'-hydroxy corresponding base
  modified_base (20)..(20): deoxythymidine
  modified_base (21)..(21): deoxythymidine
agucauucugcccacggactt

SEQ ID NO: 893 - DNA, 21 bp, Artificial Sequence
  Description of Artificial Sequence: Synthetic oligonucleotide
  Description of Combined DNA/RNA Molecule: Synthetic oligonucleotide
  siRNAs to PCSK9
  modified_base (1)..(1): 2'-hydroxy corresponding base
  modified_base (2)..(2): 2'-hydroxy corresponding base
  modified_base (3)..(3): 2'-hydroxy corresponding base
  modified_base (4)..(4): 2'-hydroxy corresponding base
  modified_base (5)..(5): 2'-hydroxy corresponding base
  modified_base (6)..(6): 2'-hydroxy corresponding base
  modified_base (7)..(7): 2'-hydroxy corresponding base
  modified_base (8)..(8): 2'-hydroxy corresponding base
  modified_base (9)..(9): 2'-hydroxy corresponding base
  modified_base (10)..(10): 2'-hydroxy corresponding base
  modified_base (11)..(11): 2'-hydroxy corresponding base
  modified_base (12)..(12): 2'-hydroxy corresponding base
  modified_base (13)..(13): 2'-hydroxy corresponding base
  modified_base (14)..(14): 2'-hydroxy corresponding base
  modified_base (15)..(15): 2'-hydroxy corresponding base
  modified_base (16)..(16): 2'-hydroxy corresponding base
  modified_base (17)..(17): 2'-hydroxy corresponding base
  modified_base (18)..(18): 2'-hydroxy corresponding base
  modified_base (19)..(19): 2'-hydroxy corresponding base
  modified_base (20)..(20): deoxythymidine
  modified_base (21)..(21): deoxythymidine
uccgugggcagaaugacuutt

SEQ ID NO: 894 - DNA, 21 bp, Artificial Sequence
  Description of Artificial Sequence: Synthetic oligonucleotide
  Description of Combined DNA/RNA Molecule: Synthetic oligonucleotide
  siRNAs to PCSK9
  modified_base (1)..(1): 2'-hydroxy corresponding base
  modified_base (2)..(2): 2'-hydroxy corresponding base
  modified_base (3)..(3): 2'-hydroxy corresponding base
  modified_base (4)..(4): 2'-hydroxy corresponding base
  modified_base (5)..(5): 2'-hydroxy corresponding base
  modified_base (6)..(6): 2'-hydroxy corresponding base
  modified_base (7)..(7): 2'-hydroxy corresponding base
  modified_base (8)..(8): 2'-hydroxy corresponding base
  modified_base (9)..(9): 2'-hydroxy corresponding base
  modified_base (10)..(10): 2'-hydroxy corresponding base
  modified_base (11)..(11): 2'-hydroxy corresponding base
  modified_base (12)..(12): 2'-hydroxy corresponding base
  modified_base (13)..(13): 2'-hydroxy corresponding base
  modified_base (14)..(14): 2'-hydroxy corresponding base
  modified_base (15)..(15): 2'-hydroxy corresponding base
  modified_base (16)..(16): 2'-hydroxy corresponding base
  modified_base (17)..(17): 2'-hydroxy corresponding base
  modified_base (18)..(18): 2'-hydroxy corresponding base
  modified_base (19)..(19): 2'-hydroxy corresponding base
  modified_base (20)..(20): deoxythymidine
  modified_base (21)..(21): deoxythymidine
aagucauucugcccacggatt

SEQ ID NO: 895 - DNA, 21 bp, Artificial Sequence
  Description of Artificial Sequence: Synthetic oligonucleotide
  Description of Combined DNA/RNA Molecule: Synthetic oligonucleotide
  siRNAs to PCSK9
  modified_base (1)..(1): 2'-hydroxy corresponding base
  modified_base (2)..(2): 2'-hydroxy corresponding base
  modified_base (3)..(3): 2'-hydroxy corresponding base
  modified_base (4)..(4): 2'-hydroxy corresponding base
  modified_base (5)..(5): 2'-hydroxy corresponding base
  modified_base (6)..(6): 2'-hydroxy corresponding base
  modified_base (7)..(7): 2'-hydroxy corresponding base
  modified_base (8)..(8): 2'-hydroxy corresponding base
  modified_base (9)..(9): 2'-hydroxy corresponding base
  modified_base (10)..(10): 2'-hydroxy corresponding base
  modified_base (11)..(11): 2'-hydroxy corresponding base
  modified_base (12)..(12): 2'-hydroxy corresponding base
  modified_base (13)..(13): 2'-hydroxy corresponding base
  modified_base (14)..(14): 2'-hydroxy corresponding base
  modified_base (15)..(15): 2'-hydroxy corresponding base
  modified_base (16)..(16): 2'-hydroxy corresponding base
  modified_base (17)..(17): 2'-hydroxy corresponding base
  modified_base (18)..(18): 2'-hydroxy corresponding base
  modified_base (19)..(19): 2'-hydroxy corresponding base
  modified_base (20)..(20): deoxythymidine
  modified_base (21)..(21): deoxythymidine
ugggcagaaugacuuuuautt

SEQ ID NO: 896 - DNA, 21 bp, Artificial Sequence
  Description of Artificial Sequence: Synthetic oligonucleotide
  Description of Combined DNA/RNA Molecule: Synthetic oligonucleotide
  siRNAs to PCSK9
  modified_base (1)..(1): 2'-hydroxy corresponding base
  modified_base (2)..(2): 2'-hydroxy corresponding base
  modified_base (3)..(3): 2'-hydroxy corresponding base
  modified_base (4)..(4): 2'-hydroxy corresponding base
  modified_base (5)..(5): 2'-hydroxy corresponding base
  modified_base (6)..(6): 2'-hydroxy corresponding base
  modified_base (7)..(7): 2'-hydroxy corresponding base
  modified_base (8)..(8): 2'-hydroxy corresponding base
  modified_base (9)..(9): 2'-hydroxy corresponding base
  modified_base (10)..(10): 2'-hydroxy corresponding base
  modified_base (11)..(11): 2'-hydroxy corresponding base
  modified_base (12)..(12): 2'-hydroxy corresponding base
  modified_base (13)..(13): 2'-hydroxy corresponding base
  modified_base (14)..(14): 2'-hydroxy corresponding base
  modified_base (15)..(15): 2'-hydroxy corresponding base
  modified_base (16)..(16): 2'-hydroxy corresponding base
  modified_base (17)..(17): 2'-hydroxy corresponding base
  modified_base (18)..(18): 2'-hydroxy corresponding base
  modified_base (19)..(19): 2'-hydroxy corresponding base
  modified_base (20)..(20): deoxythymidine
  modified_base (21)..(21): deoxythymidine
auaaaagucauucugcccatt

SEQ ID NO: 897 - DNA, 21 bp, Artificial Sequence
  Description of Artificial Sequence: Synthetic oligonucleotide
  Description of Combined DNA/RNA Molecule: Synthetic oligonucleotide
  siRNAs to PCSK9
  modified_base (1)..(1): 2'-hydroxy corresponding base
  modified_base (2)..(2): 2'-hydroxy corresponding base
  modified_base (3)..(3): 2'-hydroxy corresponding base
  modified_base (4)..(4): 2'-hydroxy corresponding base
  modified_base (5)..(5): 2'-hydroxy corresponding base
  modified_base (6)..(6): 2'-hydroxy corresponding base
  modified_base (7)..(7): 2'-hydroxy corresponding base
  modified_base (8)..(8): 2'-hydroxy corresponding base
  modified_base (9)..(9): 2'-hydroxy corresponding base
  modified_base (10)..(10): 2'-hydroxy corresponding base
  modified_base (11)..(11): 2'-hydroxy corresponding base
  modified_base (12)..(12): 2'-hydroxy corresponding base
  modified_base (13)..(13): 2'-hydroxy corresponding base
  modified_base (14)..(14): 2'-hydroxy corresponding base
  modified_base (15)..(15): 2'-hydroxy corresponding base
  modified_base (16)..(16): 2'-hydroxy corresponding base
  modified_base (17)..(17): 2'-hydroxy corresponding base
  modified_base (18)..(18): 2'-hydroxy corresponding base
  modified_base (19)..(19): 2'-hydroxy corresponding base
  modified_base (20)..(20): deoxythymidine
  modified_base (21)..(21): deoxythymidine
acuuuuauugagcucuugutt

SEQ ID NO: 898 - DNA, 21 bp, Artificial Sequence
  Description of Artificial Sequence: Synthetic oligonucleotide
  Description of Combined DNA/RNA Molecule: Synthetic oligonucleotide
  siRNAs to PCSK9
  modified_base (1)..(1): 2'-hydroxy corresponding base
  modified_base (2)..(2): 2'-hydroxy corresponding base
  modified_base (3)..(3): 2'-hydroxy corresponding base
  modified_base (4)..(4): 2'-hydroxy corresponding base
  modified_base (5)..(5): 2'-hydroxy corresponding base
  modified_base (6)..(6): 2'-hydroxy corresponding base
  modified_base (7)..(7): 2'-hydroxy corresponding base
  modified_base (8)..(8): 2'-hydroxy corresponding base
  modified_base (9)..(9): 2'-hydroxy corresponding base
  modified_base (10)..(10): 2'-hydroxy corresponding base
  modified_base (11)..(11): 2'-hydroxy corresponding base
  modified_base (12)..(12): 2'-hydroxy corresponding base
  modified_base (13)..(13): 2'-hydroxy corresponding base
  modified_base (14)..(14): 2'-hydroxy corresponding base
  modified_base (15)..(15): 2'-hydroxy corresponding base
  modified_base (16)..(16): 2'-hydroxy corresponding base
  modified_base (17)..(17): 2'-hydroxy corresponding base
  modified_base (18)..(18): 2'-hydroxy corresponding base
  modified_base (19)..(19): 2'-hydroxy corresponding base
  modified_base (20)..(20): deoxythymidine
  modified_base (21)..(21): deoxythymidine
acaagagcucaauaaaagutt

SEQ ID NO: 899 - DNA, 21 bp, Artificial Sequence
  Description of Artificial Sequence: Synthetic oligonucleotide
  Description of Combined DNA/RNA Molecule: Synthetic oligonucleotide
  siRNAs to PCSK9
  modified_base (1)..(1): 2'-hydroxy corresponding base
  modified_base (2)..(2): 2'-hydroxy corresponding base
  modified_base (3)..(3): 2'-hydroxy corresponding base
  modified_base (4)..(4): 2'-hydroxy corresponding base
  modified_base (5)..(5): 2'-hydroxy corresponding base
  modified_base (6)..(6): 2'-hydroxy corresponding base
  modified_base (7)..(7): 2'-hydroxy corresponding base
  modified_base (8)..(8): 2'-hydroxy corresponding base
  modified_base (9)..(9): 2'-hydroxy corresponding base
  modified_base (10)..(10): 2'-hydroxy corresponding base
  modified_base (11)..(11): 2'-hydroxy corresponding base
  modified_base (12)..(12): 2'-hydroxy corresponding base
  modified_base (13)..(13): 2'-hydroxy corresponding base
  modified_base (14)..(14): 2'-hydroxy corresponding base
  modified_base (15)..(15): 2'-hydroxy corresponding base
  modified_base (16)..(16): 2'-hydroxy corresponding base
  modified_base (17)..(17): 2'-hydroxy corresponding base
  modified_base (18)..(18): 2'-hydroxy corresponding base
  modified_base (19)..(19): 2'-hydroxy corresponding base
  modified_base (20)..(20): deoxythymidine
  modified_base (21)..(21): deoxythymidine
auugagcucuuguuccgugtt

SEQ ID NO: 900 - DNA, 21 bp, Artificial Sequence
  Description of Artificial Sequence: Synthetic oligonucleotide
  Description of Combined DNA/RNA Molecule: Synthetic oligonucleotide
  siRNAs to PCSK9
  modified_base (1)..(1): 2'-hydroxy corresponding base
  modified_base (2)..(2): 2'-hydroxy corresponding base
  modified_base (3)..(3): 2'-hydroxy corresponding base
  modified_base (4)..(4): 2'-hydroxy corresponding base
  modified_base (5)..(5): 2'-hydroxy corresponding base
  modified_base (6)..(6): 2'-hydroxy corresponding base
  modified_base (7)..(7): 2'-hydroxy corresponding base
  modified_base (8)..(8): 2'-hydroxy corresponding base
  modified_base (9)..(9): 2'-hydroxy corresponding base
  modified_base (10)..(10): 2'-hydroxy corresponding base
  modified_base (11)..(11): 2'-hydroxy corresponding base
  modified_base (12)..(12): 2'-hydroxy corresponding base
  modified_base (13)..(13): 2'-hydroxy corresponding base
  modified_base (14)..(14): 2'-hydroxy corresponding base
  modified_base (15)..(15): 2'-hydroxy corresponding base
  modified_base (16)..(16): 2'-hydroxy corresponding base
  modified_base (17)..(17): 2'-hydroxy corresponding base
  modified_base (18)..(18): 2'-hydroxy corresponding base
  modified_base (19)..(19): 2'-hydroxy corresponding base
  modified_base (20)..(20): deoxythymidine
  modified_base (21)..(21): deoxythymidine
cacggaacaagagcucaautt

SEQ ID NO: 901 - DNA, 21 bp, Artificial Sequence
  Description of Artificial Sequence: Synthetic oligonucleotide
  Description of Combined DNA/RNA Molecule: Synthetic oligonucleotide
  siRNAs to PCSK9
  modified_base (1)..(1): 2'-hydroxy corresponding base
  modified_base (2)..(2): 2'-hydroxy corresponding base
  modified_base (3)..(3): 2'-hydroxy corresponding base
  modified_base (4)..(4): 2'-hydroxy corresponding base
  modified_base (5)..(5): 2'-hydroxy corresponding base
  modified_base (6)..(6): 2'-hydroxy corresponding base
  modified_base (7)..(7): 2'-hydroxy corresponding base
  modified_base (8)..(8): 2'-hydroxy corresponding base
  modified_base (9)..(9): 2'-hydroxy corresponding base
  modified_base (10)..(10): 2'-hydroxy corresponding base
  modified_base (11)..(11): 2'-hydroxy corresponding base
  modified_base (12)..(12): 2'-hydroxy corresponding base
  modified_base (13)..(13): 2'-hydroxy corresponding base
  modified_base (14)..(14): 2'-hydroxy corresponding base
  modified_base (15)..(15): 2'-hydroxy corresponding base
  modified_base (16)..(16): 2'-hydroxy corresponding base
  modified_base (17)..(17): 2'-hydroxy corresponding base
  modified_base (18)..(18): 2'-hydroxy corresponding base
  modified_base (19)..(19): 2'-hydroxy corresponding base
  modified_base (20)..(20): deoxythymidine
  modified_base (21)..(21): deoxythymidine
agcucuuguuccgugccagtt

SEQ ID NO: 902 - DNA, 21 bp, Artificial Sequence
  Description of Artificial Sequence: Synthetic oligonucleotide
  Description of Combined DNA/RNA Molecule: Synthetic oligonucleotide
  siRNAs to PCSK9
  modified_base (1)..(1): 2'-hydroxy corresponding base
  modified_base (2)..(2): 2'-hydroxy corresponding base
  modified_base (3)..(3): 2'-hydroxy corresponding base
  modified_base (4)..(4): 2'-hydroxy corresponding base
  modified_base (5)..(5): 2'-hydroxy corresponding base
  modified_base (6)..(6): 2'-hydroxy corresponding base
  modified_base (7)..(7): 2'-hydroxy corresponding base
  modified_base (8)..(8): 2'-hydroxy corresponding base
  modified_base (9)..(9): 2'-hydroxy corresponding base
  modified_base (10)..(10): 2'-hydroxy corresponding base
  modified_base (11)..(11): 2'-hydroxy corresponding base
  modified_base (12)..(12): 2'-hydroxy corresponding base
  modified_base (13)..(13): 2'-hydroxy corresponding base
  modified_base (14)..(14): 2'-hydroxy corresponding base
  modified_base (15)..(15): 2'-hydroxy corresponding base
  modified_base (16)..(16): 2'-hydroxy corresponding base
  modified_base (17)..(17): 2'-hydroxy corresponding base
  modified_base (18)..(18): 2'-hydroxy corresponding base
  modified_base (19)..(19): 2'-hydroxy corresponding base
  modified_base (20)..(20): deoxythymidine
  modified_base (21)..(21): deoxythymidine
cuggcacggaacaagagcutt

SEQ ID NO: 903 - DNA, 21 bp, Artificial Sequence
  Description of Artificial Sequence: Synthetic oligonucleotide
  Description of Combined DNA/RNA Molecule: Synthetic oligonucleotide
  siRNAs to PCSK9
  modified_base (1)..(1): 2'-hydroxy corresponding base
  modified_base (2)..(2): 2'-hydroxy corresponding base
  modified_base (3)..(3): 2'-hydroxy corresponding base
  modified_base (4)..(4): 2'-hydroxy corresponding base
  modified_base (5)..(5): 2'-hydroxy corresponding base
  modified_base (6)..(6): 2'-hydroxy corresponding base
  modified_base (7)..(7): 2'-hydroxy corresponding base
  modified_base (8)..(8): 2'-hydroxy corresponding base
  modified_base (9)..(9): 2'-hydroxy corresponding base
  modified_base (10)..(10): 2'-hydroxy corresponding base
  modified_base (11)..(11): 2'-hydroxy corresponding base
  modified_base (12)..(12): 2'-hydroxy corresponding base
  modified_base (13)..(13): 2'-hydroxy corresponding base
  modified_base (14)..(14): 2'-hydroxy corresponding base
  modified_base (15)..(15): 2'-hydroxy corresponding base
  modified_base (16)..(16): 2'-hydroxy corresponding base
  modified_base (17)..(17): 2'-hydroxy corresponding base
  modified_base (18)..(18): 2'-hydroxy corresponding base
  modified_base (19)..(19): 2'-hydroxy corresponding base
  modified_base (20)..(20): deoxythymidine
  modified_base (21)..(21): deoxythymidine
gcucuuguuccgugccaggtt

SEQ ID NO: 904 - DNA, 21 bp, Artificial Sequence
  Description of Artificial Sequence: Synthetic oligonucleotide
  Description of Combined DNA/RNA Molecule: Synthetic oligonucleotide
  siRNAs to PCSK9
  modified_base (1)..(1): 2'-hydroxy corresponding base
  modified_base (2)..(2): 2'-hydroxy corresponding base
  modified_base (3)..(3): 2'-hydroxy corresponding base
  modified_base (4)..(4): 2'-hydroxy corresponding base
  modified_base (5)..(5): 2'-hydroxy corresponding base
  modified_base (6)..(6): 2'-hydroxy corresponding base
  modified_base (7)..(7): 2'-hydroxy corresponding base
  modified_base (8)..(8): 2'-hydroxy corresponding base
  modified_base (9)..(9): 2'-hydroxy corresponding base
  modified_base (10)..(10): 2'-hydroxy corresponding base
  modified_base (11)..(11): 2'-hydroxy corresponding base
  modified_base (12)..(12): 2'-hydroxy corresponding base
  modified_base (13)..(13): 2'-hydroxy corresponding base
  modified_base (14)..(14): 2'-hydroxy corresponding base
  modified_base (15)..(15): 2'-hydroxy corresponding base
  modified_base (16)..(16): 2'-hydroxy corresponding base
  modified_base (17)..(17): 2'-hydroxy corresponding base
  modified_base (18)..(18): 2'-hydroxy corresponding base
  modified_base (19)..(19): 2'-hydroxy corresponding base
  modified_base (20)..(20): deoxythymidine
  modified_base (21)..(21): deoxythymidine
ccuggcacggaacaagagctt

SEQ ID NO: 905 - DNA, 21 bp, Artificial Sequence
  Description of Artificial Sequence: Synthetic oligonucleotide
  Description of Combined DNA/RNA Molecule: Synthetic oligonucleotide
  siRNAs to PCSK9
  modified_base (1)..(1): 2'-hydroxy corresponding base
  modified_base (2)..(2): 2'-hydroxy corresponding base
  modified_base (3)..(3): 2'-hydroxy corresponding base
  modified_base (4)..(4): 2'-hydroxy corresponding base
  modified_base (5)..(5): 2'-hydroxy corresponding base
  modified_base (6)..(6): 2'-hydroxy corresponding base
  modified_base (7)..(7): 2'-hydroxy corresponding base
  modified_base (8)..(8): 2'-hydroxy corresponding base
  modified_base (9)..(9): 2'-hydroxy corresponding base
  modified_base (10)..(10): 2'-hydroxy corresponding base
  modified_base (11)..(11): 2'-hydroxy corresponding base
  modified_base (12)..(12): 2'-hydroxy corresponding base
  modified_base (13)..(13): 2'-hydroxy corresponding base
  modified_base (14)..(14): 2'-hydroxy corresponding base
  modified_base (15)..(15): 2'-hydroxy corresponding base
  modified_base (16)..(16): 2'-hydroxy corresponding base
  modified_base (17)..(17): 2'-hydroxy corresponding base
  modified_base (18)..(18): 2'-hydroxy corresponding base
  modified_base (19)..(19): 2'-hydroxy corresponding base
  modified_base (20)..(20): deoxythymidine
  modified_base (21)..(21): deoxythymidine
uguuccgugccaggcauuctt

SEQ ID NO: 906 - DNA, 21 bp, Artificial Sequence
  Description of Artificial Sequence: Synthetic oligonucleotide
  Description of Combined DNA/RNA Molecule: Synthetic oligonucleotide
  siRNAs to PCSK9
  modified_base (1)..(1): 2'-hydroxy corresponding base
  modified_base (2)..(2): 2'-hydroxy corresponding base
  modified_base (3)..(3): 2'-hydroxy corresponding base
  modified_base (4)..(4): 2'-hydroxy corresponding base
  modified_base (5)..(5): 2'-hydroxy corresponding base
  modified_base (6)..(6): 2'-hydroxy corresponding base
  modified_base (7)..(7): 2'-hydroxy corresponding base
  modified_base (8)..(8): 2'-hydroxy corresponding base
  modified_base (9)..(9): 2'-hydroxy corresponding base
  modified_base (10)..(10): 2'-hydroxy corresponding base
  modified_base (11)..(11): 2'-hydroxy corresponding base
  modified_base (12)..(12): 2'-hydroxy corresponding base
  modified_base (13)..(13): 2'-hydroxy corresponding base
  modified_base (14)..(14): 2'-hydroxy corresponding base
  modified_base (15)..(15): 2'-hydroxy corresponding base
  modified_base (16)..(16): 2'-hydroxy corresponding base
  modified_base (17)..(17): 2'-hydroxy corresponding base
  modified_base (18)..(18): 2'-hydroxy corresponding base
  modified_base (19)..(19): 2'-hydroxy corresponding base
  modified_base (20)..(20): deoxythymidine
  modified_base (21)..(21): deoxythymidine
gaaugccuggcacggaacatt

SEQ ID NO: 907 - DNA, 21 bp, Artificial Sequence
  Description of Artificial Sequence: Synthetic oligonucleotide
  Description of Combined DNA/RNA Molecule: Synthetic oligonucleotide
  siRNAs to PCSK9
  modified_base (1)..(1): 2'-hydroxy corresponding base
  modified_base (2)..(2): 2'-hydroxy corresponding base
  modified_base (3)..(3): 2'-hydroxy corresponding base
  modified_base (4)..(4): 2'-hydroxy corresponding base
  modified_base (5)..(5): 2'-hydroxy corresponding base
  modified_base (6)..(6): 2'-hydroxy corresponding base
  modified_base (7)..(7): 2'-hydroxy corresponding base
  modified_base (8)..(8): 2'-hydroxy corresponding base
  modified_base (9)..(9): 2'-hydroxy corresponding base
  modified_base (10)..(10): 2'-hydroxy corresponding base
  modified_base (11)..(11): 2'-hydroxy corresponding base
  modified_base (12)..(12): 2'-hydroxy corresponding base
  modified_base (13)..(13): 2'-hydroxy corresponding base
  modified_base (14)..(14): 2'-hydroxy corresponding base
  modified_base (15)..(15): 2'-hydroxy corresponding base
  modified_base (16)..(16): 2'-hydroxy corresponding base
  modified_base (17)..(17): 2'-hydroxy corresponding base
  modified_base (18)..(18): 2'-hydroxy corresponding base
  modified_base (19)..(19): 2'-hydroxy corresponding base
  modified_base (20)..(20): deoxythymidine
  modified_base (21)..(21): deoxythymidine
guuccgugccaggcauucatt

SEQ ID NO: 908 - DNA, 21 bp, Artificial Sequence
  Description of Artificial Sequence: Synthetic oligonucleotide
  Description of Combined DNA/RNA Molecule: Synthetic oligonucleotide
  siRNAs to PCSK9
  modified_base (1)..(1): 2'-hydroxy corresponding base
  modified_base (2)..(2): 2'-hydroxy corresponding base
  modified_base (3)..(3): 2'-hydroxy corresponding base
  modified_base (4)..(4): 2'-hydroxy corresponding base
  modified_base (5)..(5): 2'-hydroxy corresponding base
  modified_base (6)..(6): 2'-hydroxy corresponding base
  modified_base (7)..(7): 2'-hydroxy corresponding base
  modified_base (8)..(8): 2'-hydroxy corresponding base
  modified_base (9)..(9): 2'-hydroxy corresponding base
  modified_base (10)..(10): 2'-hydroxy corresponding base
  modified_base (11)..(11): 2'-hydroxy corresponding base
  modified_base (12)..(12): 2'-hydroxy corresponding base
  modified_base (13)..(13): 2'-hydroxy corresponding base
  modified_base (14)..(14): 2'-hydroxy corresponding base
  modified_base (15)..(15): 2'-hydroxy corresponding base
  modified_base (16)..(16): 2'-hydroxy corresponding base
  modified_base (17)..(17): 2'-hydroxy corresponding base
  modified_base (18)..(18): 2'-hydroxy corresponding base
  modified_base (19)..(19): 2'-hydroxy corresponding base
  modified_base (20)..(20): deoxythymidine
  modified_base (21)..(21): deoxythymidine
ugaaugccuggcacggaactt

SEQ ID NO: 909 - DNA, 21 bp, Artificial Sequence
  Description of Artificial Sequence: Synthetic oligonucleotide
  Description of Combined DNA/RNA Molecule: Synthetic oligonucleotide
  siRNAs to PCSK9
  modified_base (1)..(1): 2'-hydroxy corresponding base
  modified_base (2)..(2): 2'-hydroxy corresponding base
  modified_base (3)..(3): 2'-hydroxy corresponding base
  modified_base (4)..(4): 2'-hydroxy corresponding base
  modified_base (5)..(5): 2'-hydroxy corresponding base
  modified_base (6)..(6): 2'-hydroxy corresponding base
  modified_base (7)..(7): 2'-hydroxy corresponding base
  modified_base (8)..(8): 2'-hydroxy corresponding base
  modified_base (9)..(9): 2'-hydroxy corresponding base
  modified_base (10)..(10): 2'-hydroxy corresponding base
  modified_base (11)..(11): 2'-hydroxy corresponding base
  modified_base (12)..(12): 2'-hydroxy corresponding base
  modified_base (13)..(13): 2'-hydroxy corresponding base
  modified_base (14)..(14): 2'-hydroxy corresponding base
  modified_base (15)..(15): 2'-hydroxy corresponding base
  modified_base (16)..(16): 2'-hydroxy corresponding base
  modified_base (17)..(17): 2'-hydroxy corresponding base
  modified_base (18)..(18): 2'-hydroxy corresponding base
  modified_base (19)..(19): 2'-hydroxy corresponding base
  modified_base (20)..(20): deoxythymidine
  modified_base (21)..(21): deoxythymidine
uuccgugccaggcauucaatt

SEQ ID NO: 910 - DNA, 21 bp, Artificial Sequence
  Description of Artificial Sequence: Synthetic oligonucleotide
  Description of Combined DNA/RNA Molecule: Synthetic oligonucleotide
  siRNAs to PCSK9
  modified_base (1)..(1): 2'-hydroxy corresponding base
  modified_base (2)..(2): 2'-hydroxy corresponding base
  modified_base (3)..(3): 2'-hydroxy corresponding base
  modified_base (4)..(4): 2'-hydroxy corresponding base
  modified_base (5)..(5): 2'-hydroxy corresponding base
  modified_base (6)..(6): 2'-hydroxy corresponding base
  modified_base (7)..(7): 2'-hydroxy corresponding base
  modified_base (8)..(8): 2'-hydroxy corresponding base
  modified_base (9)..(9): 2'-hydroxy corresponding base
  modified_base (10)..(10): 2'-hydroxy corresponding base
  modified_base (11)..(11): 2'-hydroxy corresponding base
  modified_base (12)..(12): 2'-hydroxy corresponding base
  modified_base (13)..(13): 2'-hydroxy corresponding base
  modified_base (14)..(14): 2'-hydroxy corresponding base
  modified_base (15)..(15): 2'-hydroxy corresponding base
  modified_base (16)..(16): 2'-hydroxy corresponding base
  modified_base (17)..(17): 2'-hydroxy corresponding base
  modified_base (18)..(18): 2'-hydroxy corresponding base
  modified_base (19)..(19): 2'-hydroxy corresponding base
  modified_base (20)..(20): deoxythymidine
  modified_base (21)..(21): deoxythymidine
uugaaugccuggcacggaatt

SEQ ID NO: 911 - DNA, 21 bp, Artificial Sequence
  Description of Artificial Sequence: Synthetic oligonucleotide
  Description of Combined DNA/RNA Molecule: Synthetic oligonucleotide
  siRNAs to PCSK9
  modified_base (1)..(1): 2'-hydroxy corresponding base
  modified_base (2)..(2): 2'-hydroxy corresponding base
  modified_base (3)..(3): 2'-hydroxy corresponding base
  modified_base (4)..(4): 2'-hydroxy corresponding base
  modified_base (5)..(5): 2'-hydroxy corresponding base
  modified_base (6)..(6): 2'-hydroxy corresponding base
  modified_base (7)..(7): 2'-hydroxy corresponding base
  modified_base (8)..(8): 2'-hydroxy corresponding base
  modified_base (9)..(9): 2'-hydroxy corresponding base
  modified_base (10)..(10): 2'-hydroxy corresponding base
  modified_base (11)..(11): 2'-hydroxy corresponding base
  modified_base (12)..(12): 2'-hydroxy corresponding base
  modified_base (13)..(13): 2'-hydroxy corresponding base
  modified_base (14)..(14): 2'-hydroxy corresponding base
  modified_base (15)..(15): 2'-hydroxy corresponding base
  modified_base (16)..(16): 2'-hydroxy corresponding base
  modified_base (17)..(17): 2'-hydroxy corresponding base
  modified_base (18)..(18): 2'-hydroxy corresponding base
  modified_base (19)..(19): 2'-hydroxy corresponding base
  modified_base (20)..(20): deoxythymidine
  modified_base (21)..(21): deoxythymidine
cgugccaggcauucaaucctt

SEQ ID NO: 912 - DNA, 21 bp, Artificial Sequence
  Description of Artificial Sequence: Synthetic oligonucleotide
  Description of Combined DNA/RNA Molecule: Synthetic oligonucleotide
  siRNAs to PCSK9
  modified_base (1)..(1): 2'-hydroxy corresponding base
  modified_base (2)..(2): 2'-hydroxy corresponding base
  modified_base (3)..(3): 2'-hydroxy corresponding base
  modified_base (4)..(4): 2'-hydroxy corresponding base
  modified_base (5)..(5): 2'-hydroxy corresponding base
  modified_base (6)..(6): 2'-hydroxy corresponding base
  modified_base (7)..(7): 2'-hydroxy corresponding base
  modified_base (8)..(8): 2'-hydroxy corresponding base
  modified_base (9)..(9): 2'-hydroxy corresponding base
  modified_base (10)..(10): 2'-hydroxy corresponding base
  modified_base (11)..(11): 2'-hydroxy corresponding base
  modified_base (12)..(12): 2'-hydroxy corresponding base
  modified_base (13)..(13): 2'-hydroxy corresponding base
  modified_base (14)..(14): 2'-hydroxy corresponding base
  modified_base (15)..(15): 2'-hydroxy corresponding base
  modified_base (16)..(16): 2'-hydroxy corresponding base
  modified_base (17)..(17): 2'-hydroxy corresponding base
  modified_base (18)..(18): 2'-hydroxy corresponding base
  modified_base (19)..(19): 2'-hydroxy corresponding base
  modified_base (20)..(20): deoxythymidine
  modified_base (21)..(21): deoxythymidine
ggauugaaugccuggcacgtt

SEQ ID NO: 913 - DNA, 21 bp, Artificial Sequence
  Description of Artificial Sequence: Synthetic oligonucleotide
  Description of Combined DNA/RNA Molecule: Synthetic oligonucleotide
  siRNAs to PCSK9
  modified_base (1)..(1): 2'-hydroxy corresponding base
  modified_base (2)..(2): 2'-hydroxy corresponding base
  modified_base (3)..(3): 2'-hydroxy corresponding base
  modified_base (4)..(4): 2'-hydroxy corresponding base
  modified_base (5)..(5): 2'-hydroxy corresponding base
  modified_base (6)..(6): 2'-hydroxy corresponding base
  modified_base (7)..(7): 2'-hydroxy corresponding base
  modified_base (8)..(8): 2'-hydroxy corresponding base
  modified_base (9)..(9): 2'-hydroxy corresponding base
  modified_base (10)..(10): 2'-hydroxy corresponding base
  modified_base (11)..(11): 2'-hydroxy corresponding base
  modified_base (12)..(12): 2'-hydroxy corresponding base
  modified_base (13)..(13): 2'-hydroxy corresponding base
  modified_base (14)..(14): 2'-hydroxy corresponding base
  modified_base (15)..(15): 2'-hydroxy corresponding base
  modified_base (16)..(16): 2'-hydroxy corresponding base
  modified_base (17)..(17): 2'-hydroxy corresponding base
  modified_base (18)..(18): 2'-hydroxy corresponding base
  modified_base (19)..(19): 2'-hydroxy corresponding base
  modified_base (20)..(20): deoxythymidine
  modified_base (21)..(21): deoxythymidine
gugccaggcauucaauccutt

SEQ ID NO: 914 - DNA, 21 bp, Artificial Sequence
  Description of Artificial Sequence: Synthetic oligonucleotide
  Description of Combined DNA/RNA Molecule: Synthetic oligonucleotide
  siRNAs to PCSK9
  modified_base (1)..(1): 2'-hydroxy corresponding base
  modified_base (2)..(2): 2'-hydroxy corresponding base
  modified_base (3)..(3): 2'-hydroxy corresponding base
  modified_base (4)..(4): 2'-hydroxy corresponding base
  modified_base (5)..(5): 2'-hydroxy corresponding base
  modified_base (6)..(6): 2'-hydroxy corresponding base
  modified_base (7)..(7): 2'-hydroxy corresponding base
  modified_base (8)..(8): 2'-hydroxy corresponding base
  modified_base (9)..(9): 2'-hydroxy corresponding base
  modified_base (10)..(10): 2'-hydroxy corresponding base
  modified_base (11)..(11): 2'-hydroxy corresponding base
  modified_base (12)..(12): 2'-hydroxy corresponding base
  modified_base (13)..(13): 2'-hydroxy corresponding base
  modified_base (14)..(14): 2'-hydroxy corresponding base
  modified_base (15)..(15): 2'-hydroxy corresponding base
  modified_base (16)..(16): 2'-hydroxy corresponding base
  modified_base (17)..(17): 2'-hydroxy corresponding base
  modified_base (18)..(18): 2'-hydroxy corresponding base
  modified_base (19)..(19): 2'-hydroxy corresponding base
  modified_base (20)..(20): deoxythymidine
  modified_base (21)..(21): deoxythymidine
aggauugaaugccuggcactt

SEQ ID NO: 915 - DNA, 21 bp, Artificial Sequence
  Description of Artificial Sequence: Synthetic oligonucleotide
  Description of Combined DNA/RNA Molecule: Synthetic oligonucleotide
  siRNAs to PCSK9
  modified_base (1)..(1): 2'-hydroxy corresponding base
  modified_base (2)..(2): 2'-hydroxy corresponding base
  modified_base (3)..(3): 2'-hydroxy corresponding base
  modified_base (4)..(4): 2'-hydroxy corresponding base
  modified_base (5)..(5): 2'-hydroxy corresponding base
  modified_base (6)..(6): 2'-hydroxy corresponding base
  modified_base (7)..(7): 2'-hydroxy corresponding base
  modified_base (8)..(8): 2'-hydroxy corresponding base
  modified_base (9)..(9): 2'-hydroxy corresponding base
  modified_base (10)..(10): 2'-hydroxy corresponding base
  modified_base (11)..(11): 2'-hydroxy corresponding base
  modified_base (12)..(12): 2'-hydroxy corresponding base
  modified_base (13)..(13): 2'-hydroxy corresponding base
  modified_base (14)..(14): 2'-hydroxy corresponding base
  modified_base (15)..(15): 2'-hydroxy corresponding base
  modified_base (16)..(16): 2'-hydroxy corresponding base
  modified_base (17)..(17): 2'-hydroxy corresponding base
  modified_base (18)..(18): 2'-hydroxy corresponding base
  modified_base (19)..(19): 2'-hydroxy corresponding base
  modified_base (20)..(20): deoxythymidine
  modified_base (21)..(21): deoxythymidine
caauccucaggucuccacctt

SEQ ID NO: 916 - DNA, 21 bp, Artificial Sequence
  Description of Artificial Sequence: Synthetic oligonucleotide
  Description of Combined DNA/RNA Molecule: Synthetic oligonucleotide
  siRNAs to PCSK9
  modified_base (1)..(1): 2'-hydroxy corresponding base
  modified_base (2)..(2): 2'-hydroxy corresponding base
  modified_base (3)..(3): 2'-hydroxy corresponding base
  modified_base (4)..(4): 2'-hydroxy corresponding base
  modified_base (5)..(5): 2'-hydroxy corresponding base
  modified_base (6)..(6): 2'-hydroxy corresponding base
  modified_base (7)..(7): 2'-hydroxy corresponding base
  modified_base (8)..(8): 2'-hydroxy corresponding base
  modified_base (9)..(9): 2'-hydroxy corresponding base
  modified_base (10)..(10): 2'-hydroxy corresponding base
  modified_base (11)..(11): 2'-hydroxy corresponding base
  modified_base (12)..(12): 2'-hydroxy corresponding base
  modified_base (13)..(13): 2'-hydroxy corresponding base
  modified_base (14)..(14): 2'-hydroxy corresponding base
  modified_base (15)..(15): 2'-hydroxy corresponding base
  modified_base (16)..(16): 2'-hydroxy corresponding base
  modified_base (17)..(17): 2'-hydroxy corresponding base
  modified_base (18)..(18): 2'-hydroxy corresponding base
  modified_base (19)..(19): 2'-hydroxy corresponding base
  modified_base (20)..(20): deoxythymidine
  modified_base (21)..(21): deoxythymidine
gguggagaccugaggauugtt

SEQ ID NO: 917 - DNA, 21 bp, Artificial Sequence
  Description of Artificial Sequence: Synthetic oligonucleotide
  Description of Combined DNA/RNA Molecule: Synthetic oligonucleotide
  siRNAs to PCSK9
  modified_base (1)..(1): 2'-hydroxy corresponding base
  modified_base (2)..(2): 2'-hydroxy corresponding base
  modified_base (3)..(3): 2'-hydroxy corresponding base
  modified_base (4)..(4): 2'-hydroxy corresponding base
  modified_base (5)..(5): 2'-hydroxy corresponding base
  modified_base (6)..(6): 2'-hydroxy corresponding base
  modified_base (7)..(7): 2'-hydroxy corresponding base
  modified_base (8)..(8): 2'-hydroxy corresponding base
  modified_base (9)..(9): 2'-hydroxy corresponding base
  modified_base (10)..(10): 2'-hydroxy corresponding base
  modified_base (11)..(11): 2'-hydroxy corresponding base
  modified_base (12)..(12): 2'-hydroxy corresponding base
  modified_base (13)..(13): 2'-hydroxy corresponding base
  modified_base (14)..(14): 2'-hydroxy corresponding base
  modified_base (15)..(15): 2'-hydroxy corresponding base
  modified_base (16)..(16): 2'-hydroxy corresponding base
  modified_base (17)..(17): 2'-hydroxy corresponding base
  modified_base (18)..(18): 2'-hydroxy corresponding base
  modified_base (19)..(19): 2'-hydroxy corresponding base
  modified_base (20)..(20): deoxythymidine
  modified_base (21)..(21): 5'-thio thymidine
caccaaggaggcaggauuctt

SEQ ID NO: 918 - DNA, 21 bp, Artificial Sequence
  Description of Artificial Sequence: Synthetic oligonucleotide
  Description of Combined DNA/RNA Molecule: Synthetic oligonucleotide
  siRNAs to PCSK9
  modified_base (1)..(1): 2'-hydroxy corresponding base
  modified_base (2)..(2): 2'-hydroxy corresponding base
  modified_base (3)..(3): 2'-hydroxy corresponding base
  modified_base (4)..(4): 2'-hydroxy corresponding base
  modified_base (5)..(5): 2'-hydroxy corresponding base
  modified_base (6)..(6): 2'-hydroxy corresponding base
  modified_base (7)..(7): 2'-hydroxy corresponding base
  modified_base (8)..(8): 2'-hydroxy corresponding base
  modified_base (9)..(9): 2'-hydroxy corresponding base
  modified_base (10)..(10): 2'-hydroxy corresponding base
  modified_base (11)..(11): 2'-hydroxy corresponding base
  modified_base (12)..(12): 2'-hydroxy corresponding base
  modified_base (13)..(13): 2'-hydroxy corresponding base
  modified_base (14)..(14): 2'-hydroxy corresponding base
  modified_base (15)..(15): 2'-hydroxy corresponding base
  modified_base (16)..(16): 2'-hydroxy corresponding base
  modified_base (17)..(17): 2'-hydroxy corresponding base
  modified_base (18)..(18): 2'-hydroxy corresponding base
  modified_base (19)..(19): 2'-hydroxy corresponding base
  modified_base (20)..(20): deoxythymidine
  modified_base (21)..(21): 5'-thio thymidine
gaauccugccuccuuggugtt

SEQ ID NO: 919 - DNA, 21 bp, Artificial Sequence
  Description of Artificial Sequence: Synthetic oligonucleotide
  Description of Combined DNA/RNA Molecule: Synthetic oligonucleotide
  siRNAs to PCSK9
  modified_base (1)..(1): 2'-O-methyl corresponding base
  modified_base (2)..(2): 2'-hydroxy corresponding base
  modified_base (3)..(3): 2'-O-methyl corresponding base
  modified_base (4)..(4): 2'-O-methyl corresponding base
  modified_base (5)..(5): 2'-hydroxy corresponding base
  modified_base (6)..(6): 2'-hydroxy corresponding base
  modified_base (7)..(7): 2'-hydroxy corresponding base
  modified_base (8)..(8): 2'-hydroxy corresponding base
  modified_base (9)..(9): 2'-hydroxy corresponding base
  modified_base (10)..(10): 2'-hydroxy corresponding base
  modified_base (11)..(11): 2'-hydroxy corresponding base
  modified_base (12)..(12): 2'-O-methyl corresponding base
  modified_base (13)..(13): 2'-hydroxy corresponding base
  modified_base (14)..(14): 2'-hydroxy corresponding base
  modified_base (15)..(15): 2'-hydroxy corresponding base
  modified_base (16)..(16): 2'-hydroxy corresponding base
  modified_base (17)..(17): 2'-O-methyl corresponding base
  modified_base (18)..(18): 2'-O-methyl corresponding base
  modified_base (19)..(19): 2'-O-methyl corresponding base
  modified_base (20)..(20): deoxythymidine
  modified_base (21)..(21): 5'-thio thymidine
caccaaggaggcaggauuctt

SEQ ID NO: 920 - DNA, 21 bp, Artificial Sequence
  Description of Artificial Sequence: Synthetic oligonucleotide
  Description of Combined DNA/RNA Molecule: Synthetic oligonucleotide
  siRNAs to PCSK9
  modified_base (1)..(1): 2'-hydroxy corresponding base
  modified_base (2)..(2): 2'-hydroxy corresponding base
  modified_base (3)..(3): 2'-hydroxy corresponding base
  modified_base (4)..(4): 2'-hydroxy corresponding base
  modified_base (5)..(5): 2'-hydroxy corresponding base
  modified_base (6)..(6): 2'-hydroxy corresponding base
  modified_base (7)..(7): 2'-hydroxy corresponding base
  modified_base (8)..(8): 2'-hydroxy corresponding base
  modified_base (9)..(9): 2'-hydroxy corresponding base
  modified_base (10)..(10): 2'-hydroxy corresponding base
  modified_base (11)..(11): 2'-hydroxy corresponding base
  modified_base (12)..(12): 2'-hydroxy corresponding base
  modified_base (13)..(13): 2'-hydroxy corresponding base
  modified_base (14)..(14): 2'-hydroxy corresponding base
  modified_base (15)..(15): 2'-hydroxy corresponding base
  modified_base (16)..(16): 2'-hydroxy corresponding base
  modified_base (17)..(17): 2'-hydroxy corresponding base
  modified_base (18)..(18): 2'-hydroxy corresponding base
  modified_base (19)..(19): 2'-hydroxy corresponding base
  modified_base (20)..(20): deoxythymidine
  modified_base (21)..(21): 5'-thio thymidine
gaauccugccuccuuggugtt

SEQ ID NO: 921 - DNA, 21 bp, Artificial Sequence
  Description of Artificial Sequence: Synthetic oligonucleotide
  Description of Combined DNA/RNA Molecule: Synthetic oligonucleotide
  siRNAs to PCSK9
  modified_base (1)..(1): 2'-deoxy-2'-fluoro corresponding base
  modified_base (2)..(2): 2'-O-methyl corresponding base
  modified_base (3)..(3): 2'-deoxy-2'-fluoro corresponding base
  modified_base (4)..(4): 2'-O-methyl corresponding base
  modified_base (5)..(5): 2'-deoxy-2'-fluoro corresponding base
  modified_base (6)..(6): 2'-O-methyl corresponding base
  modified_base (7)..(7): 2'-deoxy-2'-fluoro corresponding base
  modified_base (8)..(8): 2'-O-methyl corresponding base
  modified_base (9)..(9): 2'-deoxy-2'-fluoro corresponding base
  modified_base (10)..(10): 2'-O-methyl corresponding base
  modified_base (11)..(11): 2'-deoxy-2'-fluoro corresponding base
  modified_base (12)..(12): 2'-O-methyl corresponding base
  modified_base (13)..(13): 2'-deoxy-2'-fluoro corresponding base
  modified_base (14)..(14): 2'-O-methyl corresponding base
  modified_base (15)..(15): 2'-deoxy-2'-fluoro corresponding base
  modified_base (16)..(16): 2'-O-methyl corresponding base
  modified_base (17)..(17): 2'-deoxy-2'-fluoro corresponding base
  modified_base (18)..(18): 2'-O-methyl corresponding base
  modified_base (19)..(19): 2'-deoxy-2'-fluoro corresponding base
  modified_base (20)..(20): deoxythymidine
  modified_base (21)..(21): 5'-thio thymidine
caccaaggaggcaggauuctt

SEQ ID NO: 922 - DNA, 21 bp, Artificial Sequence
  Description of Artificial Sequence: Synthetic oligonucleotide
  Description of Combined DNA/RNA Molecule: Synthetic oligonucleotide
  siRNAs to PCSK9
  modified_base (1)..(1): 2'-O-methyl corresponding base
  modified_base (2)..(2): 2'-deoxy-2'-fluoro corresponding base
  modified_base (3)..(3): 2'-O-methyl corresponding base
  modified_base (4)..(4): 2'-deoxy-2'-fluoro corresponding base
  modified_base (5)..(5): 2'-O-methyl corresponding base
  modified_base (6)..(6): 2'-deoxy-2'-fluoro corresponding base
  modified_base (7)..(7): 2'-O-methyl corresponding base
  modified_base (8)..(8): 2'-deoxy-2'-fluoro corresponding base
  modified_base (9)..(9): 2'-O-methyl corresponding base
  modified_base (10)..(10): 2'-deoxy-2'-fluoro corresponding base
  modified_base (11)..(11): 2'-O-methyl corresponding base
  modified_base (12)..(12): 2'-deoxy-2'-fluoro corresponding base
  modified_base (13)..(13): 2'-O-methyl corresponding base
  modified_base (14)..(14): 2'-deoxy-2'-fluoro corresponding base
  modified_base (15)..(15): 2'-O-methyl corresponding base
  modified_base (16)..(16): 2'-deoxy-2'-fluoro corresponding base
  modified_base (17)..(17): 2'-O-methyl corresponding base
  modified_base (18)..(18): 2'-deoxy-2'-fluoro corresponding base
  modified_base (19)..(19): 2'-O-methyl corresponding base
  modified_base (20)..(20): deoxythymidine
  modified_base (21)..(21): 5'-thio thymidine
gaauccugccuccuuggugtt

SEQ ID NO: 923 - DNA, 21 bp, Artificial Sequence
  Description of Artificial Sequence: Synthetic oligonucleotide
  Description of Combined DNA/RNA Molecule: Synthetic oligonucleotide
  siRNAs to PCSK9
  modified_base (1)..(1): 2'-deoxy-2'-fluoro corresponding base
  modified_base (2)..(2): 2'-hydroxy corresponding base
  modified_base (3)..(3): 2'-deoxy-2'-fluoro corresponding base
  modified_base (4)..(4): 2'-deoxy-2'-fluoro corresponding base
  modified_base (5)..(5): 2'-hydroxy corresponding base
  modified_base (6)..(6): 2'-hydroxy corresponding base
  modified_base (7)..(7): 2'-hydroxy corresponding base
  modified_base (8)..(8): 2'-hydroxy corresponding base
  modified_base (9)..(9): 2'-hydroxy corresponding base
  modified_base (10)..(10): 2'-hydroxy corresponding base
  modified_base (11)..(11): 2'-hydroxy corresponding base
  modified_base (12)..(12): 2'-deoxy-2'-fluoro corresponding base
  modified_base (13)..(13): 2'-hydroxy corresponding base
  modified_base (14)..(14): 2'-hydroxy corresponding base
  modified_base (15)..(15): 2'-hydroxy corresponding base
  modified_base (16)..(16): 2'-hydroxy corresponding base
  modified_base (17)..(17): 2'-deoxy-2'-fluoro corresponding base
  modified_base (18)..(18): 2'-deoxy-2'-fluoro corresponding base
  modified_base (19)..(19): 2'-deoxy-2'-fluoro corresponding base
  modified_base (20)..(20): deoxythymidine
  modified_base (21)..(21): 5'-thio thymidine
caccaaggaggcaggauuctt

SEQ ID NO: 924 - DNA, 21 bp, Artificial Sequence
  Description of Artificial Sequence: Synthetic oligonucleotide
  Description of Combined DNA/RNA Molecule: Synthetic oligonucleotide
  siRNAs to PCSK9
  modified_base (1)..(1): 2'-hydroxy corresponding base
  modified_base (2)..(2): 2'-hydroxy corresponding base
  modified_base (3)..(3): 2'-hydroxy corresponding base
  modified_base (4)..(4): 2'-deoxy-2'-fluoro corresponding base
  modified_base (5)..(5): 2'-deoxy-2'-fluoro corresponding base
  modified_base (6)..(6): 2'-deoxy-2'-fluoro corresponding base
  modified_base (7)..(7): 2'-deoxy-2'-fluoro corresponding base
  modified_base (8)..(8): 2'-hydroxy corresponding base
  modified_base (9)..(9): 2'-deoxy-2'-fluoro corresponding base
  modified_base (10)..(10): 2'-deoxy-2'-fluoro corresponding base
  modified_base (11)..(11): 2'-deoxy-2'-fluoro corresponding base
  modified_base (12)..(12): 2'-deoxy-2'-fluoro corresponding base
  modified_base (13)..(13): 2'-deoxy-2'-fluoro corresponding base
  modified_base (14)..(14): 2'-deoxy-2'-fluoro corresponding base
  modified_base (15)..(15): 2'-deoxy-2'-fluoro corresponding base
  modified_base (16)..(16): 2'-hydroxy corresponding base
  modified_base (17)..(17): 2'-hydroxy corresponding base
  modified_base (18)..(18): 2'-deoxy-2'-fluoro corresponding base
  modified_base (19)..(19): 2'-hydroxy corresponding base
  modified_base (20)..(20): deoxythymidine
  modified_base (21)..(21): 5'-thio thymidine
gaauccugccuccuuggugtt

SEQ ID NO: 925 - DNA, 21 bp, Artificial Sequence
  Description of Artificial Sequence: Synthetic oligonucleotide
  Description of Combined DNA/RNA Molecule: Synthetic oligonucleotide
  siRNAs to PCSK9
  modified_base (1)..(1): 2'-hydroxy corresponding base
  modified_base (2)..(2): 2'-O-methyl corresponding base
  modified_base (3)..(3): 2'-hydroxy corresponding base
  modified_base (4)..(4): 2'-O-methyl corresponding base
  modified_base (5)..(5): 2'-hydroxy corresponding base
  modified_base (6)..(6): 2'-O-methyl corresponding base
  modified_base (7)..(7): 2'-hydroxy corresponding base
  modified_base (8)..(8): 2'-O-methyl corresponding base
  modified_base (9)..(9): 2'-hydroxy corresponding base
  modified_base (10)..(10): 2'-O-methyl corresponding base
  modified_base (11)..(11): 2'-hydroxy corresponding base
  modified_base (12)..(12): 2'-O-methyl corresponding base
  modified_base (13)..(13): 2'-hydroxy corresponding base
  modified_base (14)..(14): 2'-O-methyl corresponding base
  modified_base (15)..(15): 2'-hydroxy corresponding base
  modified_base (16)..(16): 2'-O-methyl corresponding base
  modified_base (17)..(17): 2'-hydroxy corresponding base
  modified_base (18)..(18): 2'-O-methyl corresponding base
  modified_base (19)..(19): 2'-hydroxy corresponding base
  modified_base (20)..(20): deoxythymidine
  modified_base (21)..(21): 5'-thio thymidine
caccaaggaggcaggauuctt

SEQ ID NO: 926 - DNA, 21 bp, Artificial Sequence
  Description of Artificial Sequence: Synthetic oligonucleotide
  Description of Combined DNA/RNA Molecule: Synthetic oligonucleotide
  siRNAs to PCSK9
  modified_base (1)..(1): 2'-O-methyl corresponding base
  modified_base (2)..(2): 2'-deoxy-2'-fluoro corresponding base
  modified_base (3)..(3): 2'-O-methyl corresponding base
  modified_base (4)..(4): 2'-deoxy-2'-fluoro corresponding base
  modified_base (5)..(5): 2'-O-methyl corresponding base
  modified_base (6)..(6): 2'-deoxy-2'-fluoro corresponding base
  modified_base (7)..(7): 2'-O-methyl corresponding base
  modified_base (8)..(8): 2'-deoxy-2'-fluoro corresponding base
  modified_base (9)..(9): 2'-O-methyl corresponding base
  modified_base (10)..(10): 2'-deoxy-2'-fluoro corresponding base
  modified_base (11)..(11): 2'-O-methyl corresponding base
  modified_base (12)..(12): 2'-deoxy-2'-fluoro corresponding base
  modified_base (13)..(13): 2'-O-methyl corresponding base
  modified_base (14)..(14): 2'-deoxy-2'-fluoro corresponding base
  modified_base (15)..(15): 2'-O-methyl corresponding base
  modified_base (16)..(16): 2'-deoxy-2'-fluoro corresponding base
  modified_base (17)..(17): 2'-O-methyl corresponding base
  modified_base (18)..(18): 2'-deoxy-2'-fluoro corresponding base
  modified_base (19)..(19): 2'-O-methyl corresponding base
  modified_base (20)..(20): deoxythymidine
  modified_base (21)..(21): 5'-thio thymidine
gaauccugccuccuuggugtt

SEQ ID NO: 927 - DNA, 21 bp, Artificial Sequence
  Description of Artificial Sequence: Synthetic oligonucleotide
  Description of Combined DNA/RNA Molecule: Synthetic oligonucleotide
  siRNAs to PCSK9
  modified_base (1)..(1): 2'-hydroxy corresponding base
  modified_base (2)..(2): 2'-O-methyl corresponding base
  modified_base (3)..(3): 2'-hydroxy corresponding base
  modified_base (4)..(4): 2'-O-methyl corresponding base
  modified_base (5)..(5): 2'-hydroxy corresponding base
  modified_base (6)..(6): 2'-O-methyl corresponding base
  modified_base (7)..(7): 2'-hydroxy corresponding base
  modified_base (8)..(8): 2'-O-methyl corresponding base
  modified_base (9)..(9): 2'-hydroxy corresponding base
  modified_base (10)..(10): 2'-O-methyl corresponding base
  modified_base (11)..(11): 2'-hydroxy corresponding base
  modified_base (12)..(12): 2'-O-methyl corresponding base
  modified_base (13)..(13): 2'-hydroxy corresponding base
  modified_base (14)..(14): 2'-O-methyl corresponding base
  modified_base (15)..(15): 2'-hydroxy corresponding base
  modified_base (16)..(16): 2'-O-methyl corresponding base
  modified_base (17)..(17): 2'-hydroxy corresponding base
  modified_base (18)..(18): 2'-O-methyl corresponding base
  modified_base (19)..(19): 2'-hydroxy corresponding base
  modified_base (20)..(20): deoxythymidine
  modified_base (21)..(21): 5'-thio thymidine
caccaaggaggcaggauuctt

SEQ ID NO: 928 - DNA, 21 bp, Artificial Sequence
  Description of Artificial Sequence: Synthetic oligonucleotide
  Description of Combined DNA/RNA Molecule: Synthetic oligonucleotide
  siRNAs to PCSK9
  modified_base (1)..(1): 2'-hydroxy corresponding base
  modified_base (2)..(2): 2'-hydroxy corresponding base
  modified_base (3)..(3): 2'-hydroxy corresponding base
  modified_base (4)..(4): 2'-deoxy-2'-fluoro corresponding base
  modified_base (5)..(5): 2'-deoxy-2'-fluoro corresponding base
  modified_base (6)..(6): 2'-deoxy-2'-fluoro corresponding base
  modified_base (7)..(7): 2'-deoxy-2'-fluoro corresponding base
  modified_base (8)..(8): 2'-hydroxy corresponding base
  modified_base (9)..(9): 2'-deoxy-2'-fluoro corresponding base
  modified_base (10)..(10): 2'-deoxy-2'-fluoro corresponding base
  modified_base (11)..(11): 2'-deoxy-2'-fluoro corresponding base
  modified_base (12)..(12): 2'-deoxy-2'-fluoro corresponding base
  modified_base (13)..(13): 2'-deoxy-2'-fluoro corresponding base
  modified_base (14)..(14): 2'-deoxy-2'-fluoro corresponding base
  modified_base (15)..(15): 2'-deoxy-2'-fluoro corresponding base
  modified_base (16)..(16): 2'-hydroxy corresponding base
  modified_base (17)..(17): 2'-hydroxy corresponding base
  modified_base (18)..(18): 2'-deoxy-2'-fluoro corresponding base
  modified_base (19)..(19): 2'-hydroxy corresponding base
  modified_base (20)..(20): deoxythymidine
  modified_base (21)..(21): 5'-thio thymidine
gaauccugccuccuuggugtt

SEQ ID NO: 929 - DNA, 21 bp, Artificial Sequence
  Description of Artificial Sequence: Synthetic oligonucleotide
  Description of Combined DNA/RNA Molecule: Synthetic oligonucleotide
  siRNAs to PCSK9
  modified_base (1)..(1): 2'-deoxy-2'-fluoro corresponding base
  modified_base (2)..(2): 2'-O-methyl corresponding base
  modified_base (3)..(3): 2'-deoxy-2'-fluoro corresponding base
  modified_base (4)..(4): 2'-O-methyl corresponding base
  modified_base (5)..(5): 2'-deoxy-2'-fluoro corresponding base
  modified_base (6)..(6): 2'-O-methyl corresponding base
  modified_base (7)..(7): 2'-deoxy-2'-fluoro corresponding base
  modified_base (8)..(8): 2'-O-methyl corresponding base
  modified_base (9)..(9): 2'-deoxy-2'-fluoro corresponding base
  modified_base (10)..(10): 2'-O-methyl corresponding base
  modified_base (11)..(11): 2'-deoxy-2'-fluoro corresponding base
  modified_base (12)..(12): 2'-O-methyl corresponding base
  modified_base (13)..(13): 2'-deoxy-2'-fluoro corresponding base
  modified_base (14)..(14): 2'-O-methyl corresponding base
  modified_base (15)..(15): 2'-deoxy-2'-fluoro corresponding base
  modified_base (16)..(16): 2'-O-methyl corresponding base
  modified_base (17)..(17): 2'-deoxy-2'-fluoro corresponding base
  modified_base (18)..(18): 2'-O-methyl corresponding base
  modified_base (19)..(19): 2'-deoxy-2'-fluoro corresponding base
  modified_base (20)..(20): deoxythymidine
  modified_base (21)..(21): 5'-thio thymidine
caccaaggaggcaggauuctt

SEQ ID NO: 930 - DNA, 21 bp, Artificial Sequence
  Description of Artificial Sequence: Synthetic oligonucleotide
  Description of Combined DNA/RNA Molecule: Synthetic oligonucleotide
  siRNAs to PCSK9
  modified_base (1)..(1): 2'-hydroxy corresponding base
  modified_base (2)..(2): 2'-hydroxy corresponding base
  modified_base (3)..(3): 2'-hydroxy corresponding base
  modified_base (4)..(4): 2'-hydroxy corresponding base
  modified_base (5)..(5): 2'-hydroxy corresponding base
  modified_base (6)..(6): 2'-O-methyl corresponding base
  modified_base (7)..(7): 2'-O-methyl corresponding base
  modified_base (8)..(8): 2'-hydroxy corresponding base
  modified_base (9)..(9): 2'-hydroxy corresponding base
  modified_base (10)..(10): 2'-O-methyl corresponding base
  modified_base (11)..(11): 2'-O-methyl corresponding base
  modified_base (12)..(12): 2'-hydroxy corresponding base
  modified_base (13)..(13): 2'-hydroxy corresponding base
  modified_base (14)..(14): 2'-hydroxy corresponding base
  modified_base (15)..(15): 2'-hydroxy corresponding base
  modified_base (16)..(16): 2'-hydroxy corresponding base
  modified_base (17)..(17): 2'-O-methyl corresponding base
  modified_base (18)..(18): 2'-O-methyl corresponding base
  modified_base (19)..(19): 2'-O-methyl corresponding base
  modified_base (20)..(20): deoxythymidine
  modified_base (21)..(21): 5'-thio thymidine
gaauccugccuccuuggugtt

SEQ ID NO: 931 - DNA, 21 bp, Artificial Sequence
  Description of Artificial Sequence: Synthetic oligonucleotide
  Description of Combined DNA/RNA Molecule: Synthetic oligonucleotide
  siRNAs to PCSK9
  modified_base (1)..(1): 2'-deoxy-2'-fluoro corresponding base
  modified_base (2)..(2): 2'-hydroxy corresponding base
  modified_base (3)..(3): 2'-deoxy-2'-fluoro corresponding base
  modified_base (4)..(4): 2'-deoxy-2'-fluoro corresponding base
  modified_base (5)..(5): 2'-hydroxy corresponding base
  modified_base (6)..(6): 2'-hydroxy corresponding base
  modified_base (7)..(7): 2'-hydroxy corresponding base
  modified_base (8)..(8): 2'-hydroxy corresponding base
  modified_base (9)..(9): 2'-hydroxy corresponding base
  modified_base (10)..(10): 2'-hydroxy corresponding base
  modified_base (11)..(11): 2'-hydroxy corresponding base
  modified_base (12)..(12): 2'-deoxy-2'-fluoro corresponding base
  modified_base (13)..(13): 2'-hydroxy corresponding base
  modified_base (14)..(14): 2'-hydroxy corresponding base
  modified_base (15)..(15): 2'-hydroxy corresponding base
  modified_base (16)..(16): 2'-hydroxy corresponding base
  modified_base (17)..(17): 2'-deoxy-2'-fluoro corresponding base
  modified_base (18)..(18): 2'-deoxy-2'-fluoro corresponding base
  modified_base (19)..(19): 2'-deoxy-2'-fluoro corresponding base
  modified_base (20)..(20): deoxythymidine
  modified_base (21)..(21): 5'-thio thymidine
caccaaggaggcaggauuctt

SEQ ID NO: 932 - DNA, 21 bp, Artificial Sequence
  Description of Artificial Sequence: Synthetic oligonucleotide
  Description of Combined DNA/RNA Molecule: Synthetic oligonucleotide
  siRNAs to PCSK9
  modified_base (1)..(1): 2'-hydroxy corresponding base
  modified_base (2)..(2): 2'-hydroxy corresponding base
  modified_base (3)..(3): 2'-hydroxy corresponding base
  modified_base (4)..(4): 2'-hydroxy corresponding base
  modified_base (5)..(5): 2'-hydroxy corresponding base
  modified_base (6)..(6): 2'-O-methyl corresponding base
  modified_base (7)..(7): 2'-O-methyl corresponding base
  modified_base (8)..(8): 2'-hydroxy corresponding base
  modified_base (9)..(9): 2'-hydroxy corresponding base
  modified_base (10)..(10): 2'-O-methyl corresponding base
  modified_base (11)..(11): 2'-O-methyl corresponding base
  modified_base (12)..(12): 2'-hydroxy corresponding base
  modified_base (13)..(13): 2'-hydroxy corresponding base
  modified_base (14)..(14): 2'-hydroxy corresponding base
  modified_base (15)..(15): 2'-hydroxy corresponding base
  modified_base (16)..(16): 2'-hydroxy corresponding base
  modified_base (17)..(17): 2'-O-methyl corresponding base
  modified_base (18)..(18): 2'-O-methyl corresponding base
  modified_base (19)..(19): 2'-O-methyl corresponding base
  modified_base (20)..(20): deoxythymidine
  modified_base (21)..(21): 5'-thio thymidine
gaauccugccuccuuggugtt

SEQ ID NO: 933 - DNA, 21 bp, Artificial Sequence
  Description of Artificial Sequence: Synthetic oligonucleotide
  Description of Combined DNA/RNA Molecule: Synthetic oligonucleotide
  siRNAs to PCSK9
  modified_base (1)..(1): 2'-hydroxy corresponding base
  modified_base (2)..(2): 2'-O-methyl corresponding base
  modified_base (3)..(3): 2'-hydroxy corresponding base
  modified_base (4)..(4): 2'-O-methyl corresponding base
  modified_base (5)..(5): 2'-hydroxy corresponding base
  modified_base (6)..(6): 2'-O-methyl corresponding base
  modified_base (7)..(7): 2'-hydroxy corresponding base
  modified_base (8)..(8): 2'-O-methyl corresponding base
  modified_base (9)..(9): 2'-hydroxy corresponding base
  modified_base (10)..(10): 2'-O-methyl corresponding base
  modified_base (11)..(11): 2'-hydroxy corresponding base
  modified_base (12)..(12): 2'-O-methyl corresponding base
  modified_base (13)..(13): 2'-hydroxy corresponding base
  modified_base (14)..(14): 2'-O-methyl corresponding base
  modified_base (15)..(15): 2'-hydroxy corresponding base
  modified_base (16)..(16): 2'-O-methyl corresponding base
  modified_base (17)..(17): 2'-hydroxy corresponding base
  modified_base (18)..(18): 2'-O-methyl corresponding base
  modified_base (19)..(19): 2'-hydroxy corresponding base
  modified_base (20)..(20): deoxythymidine
  modified_base (21)..(21): 5'-thio thymidine
caccaaggaggcaggauuctt

SEQ ID NO: 934 - DNA, 21 bp, Artificial Sequence
  Description of Artificial Sequence: Synthetic oligonucleotide
  Description of Combined DNA/RNA Molecule: Synthetic oligonucleotide
  siRNAs to PCSK9
  modified_base (1)..(1): 2'-hydroxy corresponding base
  modified_base (2)..(2): 2'-hydroxy corresponding base
  modified_base (3)..(3): 2'-hydroxy corresponding base
  modified_base (4)..(4): 2'-hydroxy corresponding base
  modified_base (5)..(5): 2'-hydroxy corresponding base
  modified_base (6)..(6): 2'-O-methyl corresponding base
  modified_base (7)..(7): 2'-O-methyl corresponding base
  modified_base (8)..(8): 2'-hydroxy corresponding base
  modified_base (9)..(9): 2'-hydroxy corresponding base
  modified_base (10)..(10): 2'-O-methyl corresponding base
  modified_base (11)..(11): 2'-O-methyl corresponding base
  modified_base (12)..(12): 2'-hydroxy corresponding base
  modified_base (13)..(13): 2'-hydroxy corresponding base
  modified_base (14)..(14): 2'-hydroxy corresponding base
  modified_base (15)..(15): 2'-hydroxy corresponding base
  modified_base (16)..(16): 2'-hydroxy corresponding base
  modified_base (17)..(17): 2'-O-methyl corresponding base
  modified_base (18)..(18): 2'-O-methyl corresponding base
  modified_base (19)..(19): 2'-O-methyl corresponding base
  modified_base (20)..(20): deoxythymidine
  modified_base (21)..(21): 5'-thio thymidine
gaauccugccuccuuggugtt

SEQ ID NO: 935 - DNA, 21 bp, Artificial Sequence
  Description of Artificial Sequence: Synthetic oligonucleotide
  Description of Combined DNA/RNA Molecule: Synthetic oligonucleotide
  siRNAs to PCSK9
  modified_base (1)..(1): 2'-deoxy-2'-fluoro corresponding base
  modified_base (2)..(2): 2'-O-methyl corresponding base
  modified_base (3)..(3): 2'-deoxy-2'-fluoro corresponding base
  modified_base (4)..(4): 2'-O-methyl corresponding base
  modified_base (5)..(5): 2'-deoxy-2'-fluoro corresponding base
  modified_base (6)..(6): 2'-O-methyl corresponding base
  modified_base (7)..(7): 2'-deoxy-2'-fluoro corresponding base
  modified_base (8)..(8): 2'-O-methyl corresponding base
  modified_base (9)..(9): 2'-deoxy-2'-fluoro corresponding base
  modified_base (10)..(10): 2'-O-methyl corresponding base
  modified_base (11)..(11): 2'-deoxy-2'-fluoro corresponding base
  modified_base (12)..(12): 2'-O-methyl corresponding base
  modified_base (13)..(13): 2'-deoxy-2'-fluoro corresponding base
  modified_base (14)..(14): 2'-O-methyl corresponding base
  modified_base (15)..(15): 2'-deoxy-2'-fluoro corresponding base
  modified_base (16)..(16): 2'-O-methyl corresponding base
  modified_base (17)..(17): 2'-deoxy-2'-fluoro corresponding base
  modified_base (18)..(18): 2'-O-methyl corresponding base
  modified_base (19)..(19): 2'-deoxy-2'-fluoro corresponding base
  modified_base (20)..(20): deoxythymidine
  modified_base (21)..(21): 5'-thio thymidine
ggccuggaguuuauucggatt

SEQ ID NO: 936 - DNA, 21 bp, Artificial Sequence
  Description of Artificial Sequence: Synthetic oligonucleotide
  Description of Combined DNA/RNA Molecule: Synthetic oligonucleotide
  siRNAs to PCSK9
  modified_base (1)..(1): 2'-O-methyl corresponding base
  modified_base (2)..(2): 2'-deoxy-2'-fluoro corresponding base
  modified_base (3)..(3): 2'-O-methyl corresponding base
  modified_base (4)..(4): 2'-deoxy-2'-fluoro corresponding base
  modified_base (5)..(5): 2'-O-methyl corresponding base
  modified_base (6)..(6): 2'-deoxy-2'-fluoro corresponding base
  modified_base (7)..(7): 2'-O-methyl corresponding base
  modified_base (8)..(8): 2'-deoxy-2'-fluoro corresponding base
  modified_base (9)..(9): 2'-O-methyl corresponding base
  modified_base (10)..(10): 2'-deoxy-2'-fluoro corresponding base
  modified_base (11)..(11): 2'-O-methyl corresponding base
  modified_base (12)..(12): 2'-deoxy-2'-fluoro corresponding base
  modified_base (13)..(13): 2'-O-methyl corresponding base
  modified_base (14)..(14): 2'-deoxy-2'-fluoro corresponding base
  modified_base (15)..(15): 2'-O-methyl corresponding base
  modified_base (16)..(16): 2'-deoxy-2'-fluoro corresponding base
  modified_base (17)..(17): 2'-O-methyl corresponding base
  modified_base (18)..(18): 2'-deoxy-2'-fluoro corresponding base
  modified_base (19)..(19): 2'-O-methyl corresponding base
  modified_base (20)..(20): deoxythymidine
  modified_base (21)..(21): 5'-thio thymidine
uccgaauaaacuccaggcctt

SEQ ID NO: 937 - DNA, 21 bp, Artificial Sequence
  Description of Artificial Sequence: Synthetic oligonucleotide
  Description of Combined DNA/RNA Molecule: Synthetic oligonucleotide
  siRNAs to PCSK9
  modified_base (1)..(1): 2'-hydroxy corresponding base
  modified_base (2)..(2): 2'-hydroxy corresponding base
  modified_base (3)..(3): 2'-deoxy-2'-fluoro corresponding base
  modified_base (4)..(4): 2'-deoxy-2'-fluoro corresponding base
  modified_base (5)..(5): 2'-deoxy-2'-fluoro corresponding base
  modified_base (6)..(6): 2'-hydroxy corresponding base
  modified_base (7)..(7): 2'-hydroxy corresponding base
  modified_base (8)..(8): 2'-hydroxy corresponding base
  modified_base (9)..(9): 2'-hydroxy corresponding base
  modified_base (10)..(10): 2'-deoxy-2'-fluoro corresponding base
  modified_base (11)..(11): 2'-deoxy-2'-fluoro corresponding base
  modified_base (12)..(12): 2'-deoxy-2'-fluoro corresponding base
  modified_base (13)..(13): 2'-hydroxy corresponding base
  modified_base (14)..(14): 2'-deoxy-2'-fluoro corresponding base
  modified_base (15)..(15): 2'-deoxy-2'-fluoro corresponding base
  modified_base (16)..(16): 2'-deoxy-2'-fluoro corresponding base
  modified_base (17)..(17): 2'-hydroxy corresponding base
  modified_base (18)..(18): 2'-hydroxy corresponding base
  modified_base (19)..(19): 2'-hydroxy corresponding base
  modified_base (20)..(20): deoxythymidine
  modified_base (21)..(21): 5'-thio thymidine
ggccuggaguuuauucggatt

SEQ ID NO: 938 - DNA, 21 bp, Artificial Sequence
  Description of Artificial Sequence: Synthetic oligonucleotide
  Description of Combined DNA/RNA Molecule: Synthetic oligonucleotide
  siRNAs to PCSK9
  modified_base (1)..(1): 2'-deoxy-2'-fluoro corresponding base
  modified_base (2)..(2): 2'-deoxy-2'-fluoro corresponding base
  modified_base (3)..(3): 2'-deoxy-2'-fluoro corresponding base
  modified_base (4)..(4): 2'-hydroxy corresponding base
  modified_base (5)..(5): 2'-hydroxy corresponding base
  modified_base (6)..(6): 2'-hydroxy corresponding base
  modified_base (7)..(7): 2'-deoxy-2'-fluoro corresponding base
  modified_base (8)..(8): 2'-hydroxy corresponding base
  modified_base (9)..(9): 2'-hydroxy corresponding base
  modified_base (10)..(10): 2'-hydroxy corresponding base
  modified_base (11)..(11): 2'-deoxy-2'-fluoro corresponding base
  modified_base (12)..(12): 2'-deoxy-2'-fluoro corresponding base
  modified_base (13)..(13): 2'-deoxy-2'-fluoro corresponding base
  modified_base (14)..(14): 2'-deoxy-2'-fluoro corresponding base
  modified_base (15)..(15): 2'-hydroxy corresponding base
  modified_base (16)..(16): 2'-hydroxy corresponding base
  modified_base (17)..(17): 2'-hydroxy corresponding base
  modified_base (18)..(18): 2'-deoxy-2'-fluoro corresponding base
  modified_base (19)..(19): 2'-deoxy-2'-fluoro corresponding base
  modified_base (20)..(20): deoxythymidine
  modified_base (21)..(21): 5'-thio thymidine
uccgaauaaacuccaggcctt

SEQ ID NO: 939 - DNA, 21 bp, Artificial Sequence
  Description of Artificial Sequence: Synthetic oligonucleotide
  Description of Combined DNA/RNA Molecule: Synthetic oligonucleotide
  siRNAs to PCSK9
  modified_base (1)..(1): 2'-hydroxy corresponding base
  modified_base (2)..(2): 2'-O-methyl corresponding base
  modified_base (3)..(3): 2'-hydroxy corresponding base
  modified_base (4)..(4): 2'-O-methyl corresponding base
  modified_base (5)..(5): 2'-hydroxy corresponding base
  modified_base (6)..(6): 2'-O-methyl corresponding base
  modified_base (7)..(7): 2'-hydroxy corresponding base
  modified_base (8)..(8): 2'-O-methyl corresponding base
  modified_base (9)..(9): 2'-hydroxy corresponding base
  modified_base (10)..(10): 2'-O-methyl corresponding base
  modified_base (11)..(11): 2'-hydroxy corresponding base
  modified_base (12)..(12): 2'-O-methyl corresponding base
  modified_base (13)..(13): 2'-hydroxy corresponding base
  modified_base (14)..(14): 2'-O-methyl corresponding base
  modified_base (15)..(15): 2'-hydroxy corresponding base
  modified_base (16)..(16): 2'-O-methyl corresponding base
  modified_base (17)..(17): 2'-hydroxy corresponding base
  modified_base (18)..(18): 2'-O-methyl corresponding base
  modified_base (19)..(19): 2'-hydroxy corresponding base
  modified_base (20)..(20): deoxythymidine
  modified_base (21)..(21): 5'-thio thymidine
ggccuggaguuuauucggatt

SEQ ID NO: 940 - DNA, 21 bp, Artificial Sequence
  Description of Artificial Sequence: Synthetic oligonucleotide
  Description of Combined DNA/RNA Molecule: Synthetic oligonucleotide
  siRNAs to PCSK9
  modified_base (1)..(1): 2'-O-methyl corresponding base
  modified_base (2)..(2): 2'-deoxy-2'-fluoro corresponding base
  modified_base (3)..(3): 2'-O-methyl corresponding base
  modified_base (4)..(4): 2'-deoxy-2'-fluoro corresponding base
  modified_base (5)..(5): 2'-O-methyl corresponding base
  modified_base (6)..(6): 2'-deoxy-2'-fluoro corresponding base
  modified_base (7)..(7): 2'-O-methyl corresponding base
  modified_base (8)..(8): 2'-deoxy-2'-fluoro corresponding base
  modified_base (9)..(9): 2'-O-methyl corresponding base
  modified_base (10)..(10): 2'-deoxy-2'-fluoro corresponding base
  modified_base (11)..(11): 2'-O-methyl corresponding base
  modified_base (12)..(12): 2'-deoxy-2'-fluoro corresponding base
  modified_base (13)..(13): 2'-O-methyl corresponding base
  modified_base (14)..(14): 2'-deoxy-2'-fluoro corresponding base
  modified_base (15)..(15): 2'-O-methyl corresponding base
  modified_base (16)..(16): 2'-deoxy-2'-fluoro corresponding base
  modified_base (17)..(17): 2'-O-methyl corresponding base
  modified_base (18)..(18): 2'-deoxy-2'-fluoro corresponding base
  modified_base (19)..(19): 2'-O-methyl corresponding base
  modified_base (20)..(20): deoxythymidine
  modified_base (21)..(21): 5'-thio thymidine
uccgaauaaacuccaggcctt

SEQ ID NO: 941 - DNA, 21 bp, Artificial Sequence
  Description of Artificial Sequence: Synthetic oligonucleotide
  Description of Combined DNA/RNA Molecule: Synthetic oligonucleotide
  siRNAs to PCSK9
  modified_base (1)..(1): 2'-hydroxy corresponding base
  modified_base (2)..(2): 2'-O-methyl corresponding base
  modified_base (3)..(3): 2'-hydroxy corresponding base
  modified_base (4)..(4): 2'-O-methyl corresponding base
  modified_base (5)..(5): 2'-hydroxy corresponding base
  modified_base (6)..(6): 2'-O-methyl corresponding base
  modified_base (7)..(7): 2'-hydroxy corresponding base
  modified_base (8)..(8): 2'-O-methyl corresponding base
  modified_base (9)..(9): 2'-hydroxy corresponding base
  modified_base (10)..(10): 2'-O-methyl corresponding base
  modified_base (11)..(11): 2'-hydroxy corresponding base
  modified_base (12)..(12): 2'-O-methyl corresponding base
  modified_base (13)..(13): 2'-hydroxy corresponding base
  modified_base (14)..(14): 2'-O-methyl corresponding base
  modified_base (15)..(15): 2'-hydroxy corresponding base
  modified_base (16)..(16): 2'-O-methyl corresponding base
  modified_base (17)..(17): 2'-hydroxy corresponding base
  modified_base (18)..(18): 2'-O-methyl corresponding base
  modified_base (19)..(19): 2'-hydroxy corresponding base
  modified_base (20)..(20): deoxythymidine
  modified_base (21)..(21): 5'-thio thymidine
ggccuggaguuuauucggatt

SEQ ID NO: 942 - DNA, 21 bp, Artificial Sequence
  Description of Artificial Sequence: Synthetic oligonucleotide
  Description of Combined DNA/RNA Molecule: Synthetic oligonucleotide
  siRNAs to PCSK9
  modified_base (1)..(1): 2'-deoxy-2'-fluoro corresponding base
  modified_base (2)..(2): 2'-deoxy-2'-fluoro corresponding base
  modified_base (3)..(3): 2'-deoxy-2'-fluoro corresponding base
  modified_base (4)..(4): 2'-hydroxy corresponding base
  modified_base (5)..(5): 2'-hydroxy corresponding base
  modified_base (6)..(6): 2'-hydroxy corresponding base
  modified_base (7)..(7): 2'-deoxy-2'-fluoro corresponding base
  modified_base (8)..(8): 2'-hydroxy corresponding base
  modified_base (9)..(9): 2'-hydroxy corresponding base
  modified_base (10)..(10): 2'-hydroxy corresponding base
  modified_base (11)..(11): 2'-deoxy-2'-fluoro corresponding base
  modified_base (12)..(12): 2'-deoxy-2'-fluoro corresponding base
  modified_base (13)..(13): 2'-deoxy-2'-fluoro corresponding base
  modified_base (14)..(14): 2'-deoxy-2'-fluoro corresponding base
  modified_base (15)..(15): 2'-hydroxy corresponding base
  modified_base (16)..(16): 2'-hydroxy corresponding base
  modified_base (17)..(17): 2'-hydroxy corresponding base
  modified_base (18)..(18): 2'-deoxy-2'-fluoro corresponding base
  modified_base (19)..(19): 2'-deoxy-2'-fluoro corresponding base
  modified_base (20)..(20): deoxythymidine
  modified_base (21)..(21): 5'-thio thymidine
uccgaauaaacuccaggcctt

SEQ ID NO: 943 - DNA, 21 bp, Artificial Sequence
  Description of Artificial Sequence: Synthetic oligonucleotide
  Description of Combined DNA/RNA Molecule: Synthetic oligonucleotide
  siRNAs to PCSK9
  modified_base (1)..(1): 2'-deoxy-2'-fluoro corresponding base
  modified_base (2)..(2): 2'-O-methyl corresponding base
  modified_base (3)..(3): 2'-deoxy-2'-fluoro corresponding base
  modified_base (4)..(4): 2'-O-methyl corresponding base
  modified_base (5)..(5): 2'-deoxy-2'-fluoro corresponding base
  modified_base (6)..(6): 2'-O-methyl corresponding base
  modified_base (7)..(7): 2'-deoxy-2'-fluoro corresponding base
  modified_base (8)..(8): 2'-O-methyl corresponding base
  modified_base (9)..(9): 2'-deoxy-2'-fluoro corresponding base
  modified_base (10)..(10): 2'-O-methyl corresponding base
  modified_base (11)..(11): 2'-deoxy-2'-fluoro corresponding base
  modified_base (12)..(12): 2'-O-methyl corresponding base
  modified_base (13)..(13): 2'-deoxy-2'-fluoro corresponding base
  modified_base (14)..(14): 2'-O-methyl corresponding base
  modified_base (15)..(15): 2'-deoxy-2'-fluoro corresponding base
  modified_base (16)..(16): 2'-O-methyl corresponding base
  modified_base (17)..(17): 2'-deoxy-2'-fluoro corresponding base
  modified_base (18)..(18): 2'-O-methyl corresponding base
  modified_base (19)..(19): 2'-deoxy-2'-fluoro corresponding base
  modified_base (20)..(20): deoxythymidine
  modified_base (21)..(21): 5'-thio thymidine
ggccuggaguuuauucggatt

SEQ ID NO: 944 - DNA, 21 bp, Artificial Sequence
  Description of Artificial Sequence: Synthetic oligonucleotide
  Description of Combined DNA/RNA Molecule: Synthetic oligonucleotide
  siRNAs to PCSK9
  modified_base (1)..(1): 2'-hydroxy corresponding base
  modified_base (2)..(2): 2'-hydroxy corresponding base
  modified_base (3)..(3): 2'-hydroxy corresponding base
  modified_base (4)..(4): 2'-hydroxy corresponding base
  modified_base (5)..(5): 2'-hydroxy corresponding base
  modified_base (6)..(6): 2'-O-methyl corresponding base
  modified_base (7)..(7): 2'-O-methyl corresponding base
  modified_base (8)..(8): 2'-hydroxy corresponding base
  modified_base (9)..(9): 2'-hydroxy corresponding base
  modified_base (10)..(10): 2'-O-methyl corresponding base
  modified_base (11)..(11): 2'-O-methyl corresponding base
  modified_base (12)..(12): 2'-hydroxy corresponding base
  modified_base (13)..(13): 2'-hydroxy corresponding base
  modified_base (14)..(14): 2'-hydroxy corresponding base
  modified_base (15)..(15): 2'-hydroxy corresponding base
  modified_base (16)..(16): 2'-hydroxy corresponding base
  modified_base (17)..(17): 2'-O-methyl corresponding base
  modified_base (18)..(18): 2'-O-methyl corresponding base
  modified_base (19)..(19): 2'-O-methyl corresponding base
  modified_base (20)..(20): deoxythymidine
  modified_base (21)..(21): 5'-thio thymidine
uccgaauaaacuccaggcctt

SEQ ID NO: 945 - DNA, 21 bp, Artificial Sequence
  Description of Artificial Sequence: Synthetic oligonucleotide
  Description of Combined DNA/RNA Molecule: Synthetic oligonucleotide
  siRNAs to PCSK9
  modified_base (1)..(1): 2'-hydroxy corresponding base
  modified_base (2)..(2): 2'-hydroxy corresponding base
  modified_base (3)..(3): 2'-deoxy-2'-fluoro corresponding base
  modified_base (4)..(4): 2'-deoxy-2'-fluoro corresponding base
  modified_base (5)..(5): 2'-deoxy-2'-fluoro corresponding base
  modified_base (6)..(6): 2'-hydroxy corresponding base
  modified_base (7)..(7): 2'-hydroxy corresponding base
  modified_base (8)..(8): 2'-hydroxy corresponding base
  modified_base (9)..(9): 2'-hydroxy corresponding base
  modified_base (10)..(10): 2'-deoxy-2'-fluoro corresponding base
  modified_base (11)..(11): 2'-deoxy-2'-fluoro corresponding base
  modified_base (12)..(12): 2'-deoxy-2'-fluoro corresponding base
  modified_base (13)..(13): 2'-hydroxy corresponding base
  modified_base (14)..(14): 2'-deoxy-2'-fluoro corresponding base
  modified_base (15)..(15): 2'-deoxy-2'-fluoro corresponding base
  modified_base (16)..(16): 2'-deoxy-2'-fluoro corresponding base
  modified_base (17)..(17): 2'-hydroxy corresponding base
  modified_base (18)..(18): 2'-hydroxy corresponding base
  modified_base (19)..(19): 2'-hydroxy corresponding base
  modified_base (20)..(20): deoxythymidine
  modified_base (21)..(21): 5'-thio thymidine
ggccuggaguuuauucggatt

SEQ ID NO: 946 - DNA, 21 bp, Artificial Sequence
  Description of Artificial Sequence: Synthetic oligonucleotide
  Description of Combined DNA/RNA Molecule: Synthetic oligonucleotide
  siRNAs to PCSK9
  modified_base (1)..(1): 2'-hydroxy corresponding base
  modified_base (2)..(2): 2'-hydroxy corresponding base
  modified_base (3)..(3): 2'-hydroxy corresponding base
  modified_base (4)..(4): 2'-hydroxy corresponding base
  modified_base (5)..(5): 2'-hydroxy corresponding base
  modified_base (6)..(6): 2'-O-methyl corresponding base
  modified_base (7)..(7): 2'-O-methyl corresponding base
  modified_base (8)..(8): 2'-hydroxy corresponding base
  modified_base (9)..(9): 2'-hydroxy corresponding base
  modified_base (10)..(10): 2'-O-methyl corresponding base
  modified_base (11)..(11): 2'-O-methyl corresponding base
  modified_base (12)..(12): 2'-hydroxy corresponding base
  modified_base (13)..(13): 2'-hydroxy corresponding base
  modified_base (14)..(14): 2'-hydroxy corresponding base
  modified_base (15)..(15): 2'-hydroxy corresponding base
  modified_base (16)..(16): 2'-hydroxy corresponding base
  modified_base (17)..(17): 2'-O-methyl corresponding base
  modified_base (18)..(18): 2'-O-methyl corresponding base
  modified_base (19)..(19): 2'-O-methyl corresponding base
  modified_base (20)..(20): deoxythymidine
  modified_base (21)..(21): 5'-thio thymidine
uccgaauaaacuccaggcctt

SEQ ID NO: 947 - DNA, 21 bp, Artificial Sequence
  Description of Artificial Sequence: Synthetic oligonucleotide
  Description of Combined DNA/RNA Molecule: Synthetic oligonucleotide
  siRNAs to PCSK9
  modified_base (1)..(1): 2'-hydroxy corresponding base
  modified_base (2)..(2): 2'-O-methyl corresponding base
  modified_base (3)..(3): 2'-hydroxy corresponding base
  modified_base (4)..(4): 2'-O-methyl corresponding base
  modified_base (5)..(5): 2'-hydroxy corresponding base
  modified_base (6)..(6): 2'-O-methyl corresponding base
  modified_base (7)..(7): 2'-hydroxy corresponding base
  modified_base (8)..(8): 2'-O-methyl corresponding base
  modified_base (9)..(9): 2'-hydroxy corresponding base
  modified_base (10)..(10): 2'-O-methyl corresponding base
  modified_base (11)..(11): 2'-hydroxy corresponding base
  modified_base (12)..(12): 2'-O-methyl corresponding base
  modified_base (13)..(13): 2'-hydroxy corresponding base
  modified_base (14)..(14): 2'-O-methyl corresponding base
  modified_base (15)..(15): 2'-hydroxy corresponding base
  modified_base (16)..(16): 2'-O-methyl corresponding base
  modified_base (17)..(17): 2'-hydroxy corresponding base
  modified_base (18)..(18): 2'-O-methyl corresponding base
  modified_base (19)..(19): 2'-hydroxy corresponding base
  modified_base (20)..(20): deoxythymidine
  modified_base (21)..(21): 5'-thio thymidine
ggccuggaguuuauucggatt

SEQ ID NO: 948 - DNA, 21 bp, Artificial Sequence
  Description of Artificial Sequence: Synthetic oligonucleotide
  Description of Combined DNA/RNA Molecule: Synthetic oligonucleotide
  siRNAs to PCSK9
  modified_base (1)..(1): 2'-hydroxy corresponding base
  modified_base (2)..(2): 2'-hydroxy corresponding base
  modified_base (3)..(3): 2'-hydroxy corresponding base
  modified_base (4)..(4): 2'-hydroxy corresponding base
  modified_base (5)..(5): 2'-hydroxy corresponding base
  modified_base (6)..(6): 2'-O-methyl corresponding base
  modified_base (7)..(7): 2'-O-methyl corresponding base
  modified_base (8)..(8): 2'-hydroxy corresponding base
  modified_base (9)..(9): 2'-hydroxy corresponding base
  modified_base (10)..(10): 2'-O-methyl corresponding base
  modified_base (11)..(11): 2'-O-methyl corresponding base
  modified_base (12)..(12): 2'-hydroxy corresponding base
  modified_base (13)..(13): 2'-hydroxy corresponding base
  modified_base (14)..(14): 2'-hydroxy corresponding base
  modified_base (15)..(15): 2'-hydroxy corresponding base
  modified_base (16)..(16): 2'-hydroxy corresponding base
  modified_base (17)..(17): 2'-O-methyl corresponding base
  modified_base (18)..(18): 2'-O-methyl corresponding base
  modified_base (19)..(19): 2'-O-methyl corresponding base
  modified_base (20)..(20): deoxythymidine
  modified_base (21)..(21): 5'-thio thymidine
uccgaauaaacuccaggcctt

SEQ ID NO: 949 - DNA, 21 bp, Artificial Sequence
  Description of Artificial Sequence: Synthetic oligonucleotide
  Description of Combined DNA/RNA Molecule: Synthetic oligonucleotide
  siRNAs to PCSK9
  modified_base (1)..(1): 2'-hydroxy corresponding base
  modified_base (2)..(2): 2'-hydroxy corresponding base
  modified_base (3)..(3): 2'-hydroxy corresponding base
  modified_base (4)..(4): 2'-hydroxy corresponding base
  modified_base (5)..(5): 2'-hydroxy corresponding base
  modified_base (6)..(6): 2'-hydroxy corresponding base
  modified_base (7)..(7): 2'-hydroxy corresponding base
  modified_base (8)..(8): 2'-hydroxy corresponding base
  modified_base (9)..(9): 2'-hydroxy corresponding base
  modified_base (10)..(10): 2'-hydroxy corresponding base
  modified_base (11)..(11): 2'-hydroxy corresponding base
  modified_base (12)..(12): 2'-hydroxy corresponding base
  modified_base (13)..(13): 2'-hydroxy corresponding base
  modified_base (14)..(14): 2'-hydroxy corresponding base
  modified_base (15)..(15): 2'-hydroxy corresponding base
  modified_base (16)..(16): 2'-hydroxy corresponding base
  modified_base (17)..(17): 2'-hydroxy corresponding base
  modified_base (18)..(18): 2'-hydroxy corresponding base
  modified_base (19)..(19): 2'-hydroxy corresponding base
  modified_base (20)..(20): deoxythymidine
  modified_base (21)..(21): deoxythymidine
gcaggauucuucccauggatt

SEQ ID NO: 950 - DNA, 21 bp, Artificial Sequence
  Description of Artificial Sequence: Synthetic oligonucleotide
  Description of Combined DNA/RNA Molecule: Synthetic oligonucleotide
  siRNAs to PCSK9
  modified_base (1)..(1): 2'-hydroxy corresponding base
  modified_base (2)..(2): 2'-hydroxy corresponding base
  modified_base (3)..(3): 2'-hydroxy corresponding base
  modified_base (4)..(4): 2'-hydroxy corresponding base
  modified_base (5)..(5): 2'-hydroxy corresponding base
  modified_base (6)..(6): 2'-hydroxy corresponding base
  modified_base (7)..(7): 2'-hydroxy corresponding base
  modified_base (8)..(8): 2'-hydroxy corresponding base
  modified_base (9)..(9): 2'-hydroxy corresponding base
  modified_base (10)..(10): 2'-hydroxy corresponding base
  modified_base (11)..(11): 2'-hydroxy corresponding base
  modified_base (12)..(12): 2'-hydroxy corresponding base
  modified_base (13)..(13): 2'-hydroxy corresponding base
  modified_base (14)..(14): 2'-hydroxy corresponding base
  modified_base (15)..(15): 2'-hydroxy corresponding base
  modified_base (16)..(16): 2'-hydroxy corresponding base
  modified_base (17)..(17): 2'-hydroxy corresponding base
  modified_base (18)..(18): 2'-hydroxy corresponding base
  modified_base (19)..(19): 2'-hydroxy corresponding base
  modified_base (20)..(20): deoxythymidine
  modified_base (21)..(21): deoxythymidine
uccaugggaagaauccugctt

SEQ ID NO: 951 - DNA, 21 bp, Artificial Sequence
  Description of Artificial Sequence: Synthetic oligonucleotide
  Description of Combined DNA/RNA Molecule: Synthetic oligonucleotide
  siRNAs to PCSK9
  modified_base (1)..(1): 2'-hydroxy corresponding base
  modified_base (2)..(2): 2'-hydroxy corresponding base
  modified_base (3)..(3): 2'-hydroxy corresponding base
  modified_base (4)..(4): 2'-hydroxy corresponding base
  modified_base (5)..(5): 2'-hydroxy corresponding base
  modified_base (6)..(6): 2'-hydroxy corresponding base
  modified_base (7)..(7): 2'-hydroxy corresponding base
  modified_base (8)..(8): 2'-hydroxy corresponding base
  modified_base (9)..(9): 2'-hydroxy corresponding base
  modified_base (10)..(10): 2'-hydroxy corresponding base
  modified_base (11)..(11): 2'-hydroxy corresponding base
  modified_base (12)..(12): 2'-hydroxy corresponding base
  modified_base (13)..(13): 2'-hydroxy corresponding base
  modified_base (14)..(14): 2'-hydroxy corresponding base
  modified_base (15)..(15): 2'-hydroxy corresponding base
  modified_base (16)..(16): 2'-hydroxy corresponding base
  modified_base (17)..(17): 2'-hydroxy corresponding base
  modified_base (18)..(18): 2'-hydroxy corresponding base
  modified_base (19)..(19): 2'-hydroxy corresponding base
  modified_base (20)..(20): deoxythymidine
  modified_base (21)..(21): deoxythymidine
ugcagggacaaacaucguutt

SEQ ID NO: 952 - DNA, 21 bp, Artificial Sequence
  Description of Artificial Sequence: Synthetic oligonucleotide
  Description of Combined DNA/RNA Molecule: Synthetic oligonucleotide
  siRNAs to PCSK9
  modified_base (1)..(1): 2'-hydroxy corresponding base
  modified_base (2)..(2): 2'-hydroxy corresponding base
  modified_base (3)..(3): 2'-hydroxy corresponding base
  modified_base (4)..(4): 2'-hydroxy corresponding base
  modified_base (5)..(5): 2'-hydroxy corresponding base
  modified_base (6)..(6): 2'-hydroxy corresponding base
  modified_base (7)..(7): 2'-hydroxy corresponding base
  modified_base (8)..(8): 2'-hydroxy corresponding base
  modified_base (9)..(9): 2'-hydroxy corresponding base
  modified_base (10)..(10): 2'-hydroxy corresponding base
  modified_base (11)..(11): 2'-hydroxy corresponding base
  modified_base (12)..(12): 2'-hydroxy corresponding base
  modified_base (13)..(13): 2'-hydroxy corresponding base
  modified_base (14)..(14): 2'-hydroxy corresponding base
  modified_base (15)..(15): 2'-hydroxy corresponding base
  modified_base (16)..(16): 2'-hydroxy corresponding base
  modified_base (17)..(17): 2'-hydroxy corresponding base
  modified_base (18)..(18): 2'-hydroxy corresponding base
  modified_base (19)..(19): 2'-hydroxy corresponding base
  modified_base (20)..(20): deoxythymidine
  modified_base (21)..(21): deoxythymidine
aacgauguuugucccugcatt

SEQ ID NO: 953 - DNA, 21 bp, Artificial Sequence
  Description of Artificial Sequence: Synthetic oligonucleotide
  Description of Combined DNA/RNA Molecule: Synthetic oligonucleotide
  siRNAs to PCSK9
  modified_base (1)..(1): 2'-hydroxy corresponding base
  modified_base (2)..(2): 2'-hydroxy corresponding base
  modified_base (3)..(3): 2'-hydroxy corresponding base
  modified_base (4)..(4): 2'-hydroxy corresponding base
  modified_base (5)..(5): 2'-hydroxy corresponding base
  modified_base (6)..(6): 2'-hydroxy corresponding base
  modified_base (7)..(7): 2'-hydroxy corresponding base
  modified_base (8)..(8): 2'-hydroxy corresponding base
  modified_base (9)..(9): 2'-hydroxy corresponding base
  modified_base (10)..(10): 2'-hydroxy corresponding base
  modified_base (11)..(11): 2'-hydroxy corresponding base
  modified_base (12)..(12): 2'-hydroxy corresponding base
  modified_base (13)..(13): 2'-hydroxy corresponding base
  modified_base (14)..(14): 2'-hydroxy corresponding base
  modified_base (15)..(15): 2'-hydroxy corresponding base
  modified_base (16)..(16): 2'-hydroxy corresponding base
  modified_base (17)..(17): 2'-hydroxy corresponding base
  modified_base (18)..(18): 2'-hydroxy corresponding base
  modified_base (19)..(19): 2'-hydroxy corresponding base
  modified_base (20)..(20): deoxythymidine
  modified_base (21)..(21): deoxythymidine
gcagggacaaacaucguugtt

SEQ ID NO: 954 - DNA, 21 bp, Artificial Sequence
  Description of Artificial Sequence: Synthetic oligonucleotide
  Description of Combined DNA/RNA Molecule: Synthetic oligonucleotide
  siRNAs to PCSK9
  modified_base (1)..(1): 2'-hydroxy corresponding base
  modified_base (2)..(2): 2'-hydroxy corresponding base
  modified_base (3)..(3): 2'-hydroxy corresponding base
  modified_base (4)..(4): 2'-hydroxy corresponding base
  modified_base (5)..(5): 2'-hydroxy corresponding base
  modified_base (6)..(6): 2'-hydroxy corresponding base
  modified_base (7)..(7): 2'-hydroxy corresponding base
  modified_base (8)..(8): 2'-hydroxy corresponding base
  modified_base (9)..(9): 2'-hydroxy corresponding base
  modified_base (10)..(10): 2'-hydroxy corresponding base
  modified_base (11)..(11): 2'-hydroxy corresponding base
  modified_base (12)..(12): 2'-hydroxy corresponding base
  modified_base (13)..(13): 2'-hydroxy corresponding base
  modified_base (14)..(14): 2'-hydroxy corresponding base
  modified_base (15)..(15): 2'-hydroxy corresponding base
  modified_base (16)..(16): 2'-hydroxy corresponding base
  modified_base (17)..(17): 2'-hydroxy corresponding base
  modified_base (18)..(18): 2'-hydroxy corresponding base
  modified_base (19)..(19): 2'-hydroxy corresponding base
  modified_base (20)..(20): deoxythymidine
  modified_base (21)..(21): deoxythymidine
caacgauguuugucccugctt

SEQ ID NO: 955 - DNA, 21 bp, Artificial Sequence
  Description of Artificial Sequence: Synthetic oligonucleotide
  Description of Combined DNA/RNA Molecule: Synthetic oligonucleotide
  siRNAs to PCSK9
  modified_base (1)..(1): 2'-hydroxy corresponding base
  modified_base (2)..(2): 2'-hydroxy corresponding base
  modified_base (3)..(3): 2'-hydroxy corresponding base
  modified_base (4)..(4): 2'-hydroxy corresponding base
  modified_base (5)..(5): 2'-hydroxy corresponding base
  modified_base (6)..(6): 2'-hydroxy corresponding base
  modified_base (7)..(7): 2'-hydroxy corresponding base
  modified_base (8)..(8): 2'-hydroxy corresponding base
  modified_base (9)..(9): 2'-hydroxy corresponding base
  modified_base (10)..(10): 2'-hydroxy corresponding base
  modified_base (11)..(11): 2'-hydroxy corresponding base
  modified_base (12)..(12): 2'-hydroxy corresponding base
  modified_base (13)..(13): 2'-hydroxy corresponding base
  modified_base (14)..(14): 2'-hydroxy corresponding base
  modified_base (15)..(15): 2'-hydroxy corresponding base
  modified_base (16)..(16): 2'-hydroxy corresponding base
  modified_base (17)..(17): 2'-hydroxy corresponding base
  modified_base (18)..(18): 2'-hydroxy corresponding base
  modified_base (19)..(19): 2'-hydroxy corresponding base
  modified_base (20)..(20): deoxythymidine
  modified_base (21)..(21): deoxythymidine
agggacaaacaucguugggtt

SEQ ID NO: 956 - DNA, 21 bp, Artificial Sequence
  Description of Artificial Sequence: Synthetic oligonucleotide
  Description of Combined DNA/RNA Molecule: Synthetic oligonucleotide
  siRNAs to PCSK9
  modified_base (1)..(1): 2'-hydroxy corresponding base
  modified_base (2)..(2): 2'-hydroxy corresponding base
  modified_base (3)..(3): 2'-hydroxy corresponding base
  modified_base (4)..(4): 2'-hydroxy corresponding base
  modified_base (5)..(5): 2'-hydroxy corresponding base
  modified_base (6)..(6): 2'-hydroxy corresponding base
  modified_base (7)..(7): 2'-hydroxy corresponding base
  modified_base (8)..(8): 2'-hydroxy corresponding base
  modified_base (9)..(9): 2'-hydroxy corresponding base
  modified_base (10)..(10): 2'-hydroxy corresponding base
  modified_base (11)..(11): 2'-hydroxy corresponding base
  modified_base (12)..(12): 2'-hydroxy corresponding base
  modified_base (13)..(13): 2'-hydroxy corresponding base
  modified_base (14)..(14): 2'-hydroxy corresponding base
  modified_base (15)..(15): 2'-hydroxy corresponding base
  modified_base (16)..(16): 2'-hydroxy corresponding base
  modified_base (17)..(17): 2'-hydroxy corresponding base
  modified_base (18)..(18): 2'-hydroxy corresponding base
  modified_base (19)..(19): 2'-hydroxy corresponding base
  modified_base (20)..(20): deoxythymidine
  modified_base (21)..(21): deoxythymidine
cccaacgauguuugucccutt

SEQ ID NO: 957 - DNA, 21 bp, Artificial Sequence
  Description of Artificial Sequence: Synthetic oligonucleotide
  Description of Combined DNA/RNA Molecule: Synthetic oligonucleotide
  siRNAs to PCSK9
  modified_base (1)..(1): 2'-hydroxy corresponding base
  modified_base (2)..(2): 2'-hydroxy corresponding base
  modified_base (3)..(3): 2'-hydroxy corresponding base
  modified_base (4)..(4): 2'-hydroxy corresponding base
  modified_base (5)..(5): 2'-hydroxy corresponding base
  modified_base (6)..(6): 2'-hydroxy corresponding base
  modified_base (7)..(7): 2'-hydroxy corresponding base
  modified_base (8)..(8): 2'-hydroxy corresponding base
  modified_base (9)..(9): 2'-hydroxy corresponding base
  modified_base (10)..(10): 2'-hydroxy corresponding base
  modified_base (11)..(11): 2'-hydroxy corresponding base
  modified_base (12)..(12): 2'-hydroxy corresponding base
  modified_base (13)..(13): 2'-hydroxy corresponding base
  modified_base (14)..(14): 2'-hydroxy corresponding base
  modified_base (15)..(15): 2'-hydroxy corresponding base
  modified_base (16)..(16): 2'-hydroxy corresponding base
  modified_base (17)..(17): 2'-hydroxy corresponding base
  modified_base (18)..(18): 2'-hydroxy corresponding base
  modified_base (19)..(19): 2'-hydroxy corresponding base
  modified_base (20)..(20): deoxythymidine
  modified_base (21)..(21): deoxythymidine
cccucaucuccagcuaacutt

SEQ ID NO: 958 - DNA, 21 bp, Artificial Sequence
  Description of Artificial Sequence: Synthetic oligonucleotide
  Description of Combined DNA/RNA Molecule: Synthetic oligonucleotide
  siRNAs to PCSK9
  modified_base (1)..(1): 2'-hydroxy corresponding base
  modified_base (2)..(2): 2'-hydroxy corresponding base
  modified_base (3)..(3): 2'-hydroxy corresponding base
  modified_base (4)..(4): 2'-hydroxy corresponding base
  modified_base (5)..(5): 2'-hydroxy corresponding base
  modified_base (6)..(6): 2'-hydroxy corresponding base
  modified_base (7)..(7): 2'-hydroxy corresponding base
  modified_base (8)..(8): 2'-hydroxy corresponding base
  modified_base (9)..(9): 2'-hydroxy corresponding base
  modified_base (10)..(10): 2'-hydroxy corresponding base
  modified_base (11)..(11): 2'-hydroxy corresponding base
  modified_base (12)..(12): 2'-hydroxy corresponding base
  modified_base (13)..(13): 2'-hydroxy corresponding base
  modified_base (14)..(14): 2'-hydroxy corresponding base
  modified_base (15)..(15): 2'-hydroxy corresponding base
  modified_base (16)..(16): 2'-hydroxy corresponding base
  modified_base (17)..(17): 2'-hydroxy corresponding base
  modified_base (18)..(18): 2'-hydroxy corresponding base
  modified_base (19)..(19): 2'-hydroxy corresponding base
  modified_base (20)..(20): deoxythymidine
  modified_base (21)..(21): deoxythymidine
aguuagcuggagaugagggtt

SEQ ID NO: 959 - DNA, 21 bp, Artificial Sequence
  Description of Artificial Sequence: Synthetic oligonucleotide
  Description of Combined DNA/RNA Molecule: Synthetic oligonucleotide
  siRNAs to PCSK9
  modified_base (1)..(1): 2'-hydroxy corresponding base
  modified_base (2)..(2): 2'-hydroxy corresponding base
  modified_base (3)..(3): 2'-hydroxy corresponding base
  modified_base (4)..(4): 2'-hydroxy corresponding base
  modified_base (5)..(5): 2'-hydroxy corresponding base
  modified_base (6)..(6): 2'-hydroxy corresponding base
  modified_base (7)..(7): 2'-hydroxy corresponding base
  modified_base (8)..(8): 2'-hydroxy corresponding base
  modified_base (9)..(9): 2'-hydroxy corresponding base
  modified_base (10)..(10): 2'-hydroxy corresponding base
  modified_base (11)..(11): 2'-hydroxy corresponding base
  modified_base (12)..(12): 2'-hydroxy corresponding base
  modified_base (13)..(13): 2'-hydroxy corresponding base
  modified_base (14)..(14): 2'-hydroxy corresponding base
  modified_base (15)..(15): 2'-hydroxy corresponding base
  modified_base (16)..(16): 2'-hydroxy corresponding base
  modified_base (17)..(17): 2'-hydroxy corresponding base
  modified_base (18)..(18): 2'-hydroxy corresponding base
  modified_base (19)..(19): 2'-hydroxy corresponding base
  modified_base (20)..(20): deoxythymidine
  modified_base (21)..(21): deoxythymidine
caucuccagcuaacuguggtt

SEQ ID NO: 960 - DNA, 21 bp, Artificial Sequence
  Description of Artificial Sequence: Synthetic oligonucleotide
  Description of Combined DNA/RNA Molecule: Synthetic oligonucleotide
  siRNAs to PCSK9
  modified_base (1)..(1): 2'-hydroxy corresponding base
  modified_base (2)..(2): 2'-hydroxy corresponding base
  modified_base (3)..(3): 2'-hydroxy corresponding base
  modified_base (4)..(4): 2'-hydroxy corresponding base
  modified_base (5)..(5): 2'-hydroxy corresponding base
  modified_base (6)..(6): 2'-hydroxy corresponding base
  modified_base (7)..(7): 2'-hydroxy corresponding base
  modified_base (8)..(8): 2'-hydroxy corresponding base
  modified_base (9)..(9): 2'-hydroxy corresponding base
  modified_base (10)..(10): 2'-hydroxy corresponding base
  modified_base (11)..(11): 2'-hydroxy corresponding base
  modified_base (12)..(12): 2'-hydroxy corresponding base
  modified_base (13)..(13): 2'-hydroxy corresponding base
  modified_base (14)..(14): 2'-hydroxy corresponding base
  modified_base (15)..(15): 2'-hydroxy corresponding base
  modified_base (16)..(16): 2'-hydroxy corresponding base
  modified_base (17)..(17): 2'-hydroxy corresponding base
  modified_base (18)..(18): 2'-hydroxy corresponding base
  modified_base (19)..(19): 2'-hydroxy corresponding base
  modified_base (20)..(20): deoxythymidine
  modified_base (21)..(21): deoxythymidine
ccacaguuagcuggagaugtt

SEQ ID NO: 961 - DNA, 21 bp, Artificial Sequence
  Description of Artificial Sequence: Synthetic oligonucleotide
  Description of Combined DNA/RNA Molecule: Synthetic oligonucleotide
  siRNAs to PCSK9
  modified_base (1)..(1): 2'-hydroxy corresponding base
  modified_base (2)..(2): 2'-hydroxy corresponding base
  modified_base (3)..(3): 2'-hydroxy corresponding base
  modified_base (4)..(4): 2'-hydroxy corresponding base
  modified_base (5)..(5): 2'-hydroxy corresponding base
  modified_base (6)..(6): 2'-hydroxy corresponding base
  modified_base (7)..(7): 2'-hydroxy corresponding base
  modified_base (8)..(8): 2'-hydroxy corresponding base
  modified_base (9)..(9): 2'-hydroxy corresponding base
  modified_base (10)..(10): 2'-hydroxy corresponding base
  modified_base (11)..(11): 2'-hydroxy corresponding base
  modified_base (12)..(12): 2'-hydroxy corresponding base
  modified_base (13)..(13): 2'-hydroxy corresponding base
  modified_base (14)..(14): 2'-hydroxy corresponding base
  modified_base (15)..(15): 2'-hydroxy corresponding base
  modified_base (16)..(16): 2'-hydroxy corresponding base
  modified_base (17)..(17): 2'-hydroxy corresponding base
  modified_base (18)..(18): 2'-hydroxy corresponding base
  modified_base (19)..(19): 2'-hydroxy corresponding base
  modified_base (20)..(20): deoxythymidine
  modified_base (21)..(21): deoxythymidine
gcucccugauuaauggaggtt

SEQ ID NO: 962 - DNA, 21 bp, Artificial Sequence
  Description of Artificial Sequence: Synthetic oligonucleotide
  Description of Combined DNA/RNA Molecule: Synthetic oligonucleotide
  siRNAs to PCSK9
  modified_base (1)..(1): 2'-hydroxy corresponding base
  modified_base (2)..(2): 2'-hydroxy corresponding base
  modified_base (3)..(3): 2'-hydroxy corresponding base
  modified_base (4)..(4): 2'-hydroxy corresponding base
  modified_base (5)..(5): 2'-hydroxy corresponding base
  modified_base (6)..(6): 2'-hydroxy corresponding base
  modified_base (7)..(7): 2'-hydroxy corresponding base
  modified_base (8)..(8): 2'-hydroxy corresponding base
  modified_base (9)..(9): 2'-hydroxy corresponding base
  modified_base (10)..(10): 2'-hydroxy corresponding base
  modified_base (11)..(11): 2'-hydroxy corresponding base
  modified_base (12)..(12): 2'-hydroxy corresponding base
  modified_base (13)..(13): 2'-hydroxy corresponding base
  modified_base (14)..(14): 2'-hydroxy corresponding base
  modified_base (15)..(15): 2'-hydroxy corresponding base
  modified_base (16)..(16): 2'-hydroxy corresponding base
  modified_base (17)..(17): 2'-hydroxy corresponding base
  modified_base (18)..(18): 2'-hydroxy corresponding base
  modified_base (19)..(19): 2'-hydroxy corresponding base
  modified_base (20)..(20): deoxythymidine
  modified_base (21)..(21): deoxythymidine
ccuccauuaaucagggagctt

SEQ ID NO: 963 - DNA, 21 bp, Artificial Sequence
  Description of Artificial Sequence: Synthetic oligonucleotide
  Description of Combined DNA/RNA Molecule: Synthetic oligonucleotide
  siRNAs to PCSK9
  modified_base (1)..(1): 2'-hydroxy corresponding base
  modified_base (2)..(2): 2'-hydroxy corresponding base
  modified_base (3)..(3): 2'-hydroxy corresponding base
  modified_base (4)..(4): 2'-hydroxy corresponding base
  modified_base (5)..(5): 2'-hydroxy corresponding base
  modified_base (6)..(6): 2'-hydroxy corresponding base
  modified_base (7)..(7): 2'-hydroxy corresponding base
  modified_base (8)..(8): 2'-hydroxy corresponding base
  modified_base (9)..(9): 2'-hydroxy corresponding base
  modified_base (10)..(10): 2'-hydroxy corresponding base
  modified_base (11)..(11): 2'-hydroxy corresponding base
  modified_base (12)..(12): 2'-hydroxy corresponding base
  modified_base (13)..(13): 2'-hydroxy corresponding base
  modified_base (14)..(14): 2'-hydroxy corresponding base
  modified_base (15)..(15): 2'-hydroxy corresponding base
  modified_base (16)..(16): 2'-hydroxy corresponding base
  modified_base (17)..(17): 2'-hydroxy corresponding base
  modified_base (18)..(18): 2'-hydroxy corresponding base
  modified_base (19)..(19): 2'-hydroxy corresponding base
  modified_base (20)..(20): deoxythymidine
  modified_base (21)..(21): deoxythymidine
cccugauuaauggaggcuutt

SEQ ID NO: 964 - DNA, 21 bp, Artificial Sequence
  Description of Artificial Sequence: Synthetic oligonucleotide
  Description of Combined DNA/RNA Molecule: Synthetic oligonucleotide
  siRNAs to PCSK9
  modified_base (1)..(1): 2'-hydroxy corresponding base
  modified_base (2)..(2): 2'-hydroxy corresponding base
  modified_base (3)..(3): 2'-hydroxy corresponding base
  modified_base (4)..(4): 2'-hydroxy corresponding base
  modified_base (5)..(5): 2'-hydroxy corresponding base
  modified_base (6)..(6): 2'-hydroxy corresponding base
  modified_base (7)..(7): 2'-hydroxy corresponding base
  modified_base (8)..(8): 2'-hydroxy corresponding base
  modified_base (9)..(9): 2'-hydroxy corresponding base
  modified_base (10)..(10): 2'-hydroxy corresponding base
  modified_base (11)..(11): 2'-hydroxy corresponding base
  modified_base (12)..(12): 2'-hydroxy corresponding base
  modified_base (13)..(13): 2'-hydroxy corresponding base
  modified_base (14)..(14): 2'-hydroxy corresponding base
  modified_base (15)..(15): 2'-hydroxy corresponding base
  modified_base (16)..(16): 2'-hydroxy corresponding base
  modified_base (17)..(17): 2'-hydroxy corresponding base
  modified_base (18)..(18): 2'-hydroxy corresponding base
  modified_base (19)..(19): 2'-hydroxy corresponding base
  modified_base (20)..(20): deoxythymidine
  modified_base (21)..(21): deoxythymidine
aagccuccauuaaucagggtt

SEQ ID NO: 965 - DNA, 21 bp, Artificial Sequence
  Description of Artificial Sequence: Synthetic oligonucleotide
  Description of Combined DNA/RNA Molecule: Synthetic oligonucleotide
  siRNAs to PCSK9
  modified_base (1)..(1): 2'-hydroxy corresponding base
  modified_base (2)..(2): 2'-hydroxy corresponding base
  modified_base (3)..(3): 2'-hydroxy corresponding base
  modified_base (4)..(4): 2'-hydroxy corresponding base
  modified_base (5)..(5): 2'-hydroxy corresponding base
  modified_base (6)..(6): 2'-hydroxy corresponding base
  modified_base (7)..(7): 2'-hydroxy corresponding base
  modified_base (8)..(8): 2'-hydroxy corresponding base
  modified_base (9)..(9): 2'-hydroxy corresponding base
  modified_base (10)..(10): 2'-hydroxy corresponding base
  modified_base (11)..(11): 2'-hydroxy corresponding base
  modified_base (12)..(12): 2'-hydroxy corresponding base
  modified_base (13)..(13): 2'-hydroxy corresponding base
  modified_base (14)..(14): 2'-hydroxy corresponding base
  modified_base (15)..(15): 2'-hydroxy corresponding base
  modified_base (16)..(16): 2'-hydroxy corresponding base
  modified_base (17)..(17): 2'-hydroxy corresponding base
  modified_base (18)..(18): 2'-hydroxy corresponding base
  modified_base (19)..(19): 2'-hydroxy corresponding base
  modified_base (20)..(20): deoxythymidine
  modified_base (21)..(21): deoxythymidine
ccugauuaauggaggcuuatt

SEQ ID NO: 966 - DNA, 21 bp, Artificial Sequence
  Description of Artificial Sequence: Synthetic oligonucleotide
  Description of Combined DNA/RNA Molecule: Synthetic oligonucleotide
  siRNAs to PCSK9
  modified_base (1)..(1): 2'-hydroxy corresponding base
  modified_base (2)..(2): 2'-hydroxy corresponding base
  modified_base (3)..(3): 2'-hydroxy corresponding base
  modified_base (4)..(4): 2'-hydroxy corresponding base
  modified_base (5)..(5): 2'-hydroxy corresponding base
  modified_base (6)..(6): 2'-hydroxy corresponding base
  modified_base (7)..(7): 2'-hydroxy corresponding base
  modified_base (8)..(8): 2'-hydroxy corresponding base
  modified_base (9)..(9): 2'-hydroxy corresponding base
  modified_base (10)..(10): 2'-hydroxy corresponding base
  modified_base (11)..(11): 2'-hydroxy corresponding base
  modified_base (12)..(12): 2'-hydroxy corresponding base
  modified_base (13)..(13): 2'-hydroxy corresponding base
  modified_base (14)..(14): 2'-hydroxy corresponding base
  modified_base (15)..(15): 2'-hydroxy corresponding base
  modified_base (16)..(16): 2'-hydroxy corresponding base
  modified_base (17)..(17): 2'-hydroxy corresponding base
  modified_base (18)..(18): 2'-hydroxy corresponding base
  modified_base (19)..(19): 2'-hydroxy corresponding base
  modified_base (20)..(20): deoxythymidine
  modified_base (21)..(21): deoxythymidine
uaagccuccauuaaucaggtt

SEQ ID NO: 967 - DNA, 21 bp, Artificial Sequence
  Description of Artificial Sequence: Synthetic oligonucleotide
  Description of Combined DNA/RNA Molecule: Synthetic oligonucleotide
  siRNAs to PCSK9
  modified_base (1)..(1): 2'-hydroxy corresponding base
  modified_base (2)..(2): 2'-hydroxy corresponding base
  modified_base (3)..(3): 2'-hydroxy corresponding base
  modified_base (4)..(4): 2'-hydroxy corresponding base
  modified_base (5)..(5): 2'-hydroxy corresponding base
  modified_base (6)..(6): 2'-hydroxy corresponding base
  modified_base (7)..(7): 2'-hydroxy corresponding base
  modified_base (8)..(8): 2'-hydroxy corresponding base
  modified_base (9)..(9): 2'-hydroxy corresponding base
  modified_base (10)..(10): 2'-hydroxy corresponding base
  modified_base (11)..(11): 2'-hydroxy corresponding base
  modified_base (12)..(12): 2'-hydroxy corresponding base
  modified_base (13)..(13): 2'-hydroxy corresponding base
  modified_base (14)..(14): 2'-hydroxy corresponding base
  modified_base (15)..(15): 2'-hydroxy corresponding base
  modified_base (16)..(16): 2'-hydroxy corresponding base
  modified_base (17)..(17): 2'-hydroxy corresponding base
  modified_base (18)..(18): 2'-hydroxy corresponding base
  modified_base (19)..(19): 2'-hydroxy corresponding base
  modified_base (20)..(20): deoxythymidine
  modified_base (21)..(21): deoxythymidine
ugauuaauggaggcuuagctt

SEQ ID NO: 968 - DNA, 21 bp, Artificial Sequence
  Description of Artificial Sequence: Synthetic oligonucleotide
  Description of Combined DNA/RNA Molecule: Synthetic oligonucleotide
  siRNAs to PCSK9
  modified_base (1)..(1): 2'-hydroxy corresponding base
  modified_base (2)..(2): 2'-hydroxy corresponding base
  modified_base (3)..(3): 2'-hydroxy corresponding base
  modified_base (4)..(4): 2'-hydroxy corresponding base
  modified_base (5)..(5): 2'-hydroxy corresponding base
  modified_base (6)..(6): 2'-hydroxy corresponding base
  modified_base (7)..(7): 2'-hydroxy corresponding base
  modified_base (8)..(8): 2'-hydroxy corresponding base
  modified_base (9)..(9): 2'-hydroxy corresponding base
  modified_base (10)..(10): 2'-hydroxy corresponding base
  modified_base (11)..(11): 2'-hydroxy corresponding base
  modified_base (12)..(12): 2'-hydroxy corresponding base
  modified_base (13)..(13): 2'-hydroxy corresponding base
  modified_base (14)..(14): 2'-hydroxy corresponding base
  modified_base (15)..(15): 2'-hydroxy corresponding base
  modified_base (16)..(16): 2'-hydroxy corresponding base
  modified_base (17)..(17): 2'-hydroxy corresponding base
  modified_base (18)..(18): 2'-hydroxy corresponding base
  modified_base (19)..(19): 2'-hydroxy corresponding base
  modified_base (20)..(20): deoxythymidine
  modified_base (21)..(21): deoxythymidine
gcuaagccuccauuaaucatt

SEQ ID NO: 969 - DNA, 21 bp, Artificial Sequence
  Description of Artificial Sequence: Synthetic oligonucleotide
  Description of Combined DNA/RNA Molecule: Synthetic oligonucleotide
  siRNAs to PCSK9
  modified_base (1)..(1): 2'-hydroxy corresponding base
  modified_base (2)..(2): 2'-hydroxy corresponding base
  modified_base (3)..(3): 2'-hydroxy corresponding base
  modified_base (4)..(4): 2'-hydroxy corresponding base
  modified_base (5)..(5): 2'-hydroxy corresponding base
  modified_base (6)..(6): 2'-hydroxy corresponding base
  modified_base (7)..(7): 2'-hydroxy corresponding base
  modified_base (8)..(8): 2'-hydroxy corresponding base
  modified_base (9)..(9): 2'-hydroxy corresponding base
  modified_base (10)..(10): 2'-hydroxy corresponding base
  modified_base (11)..(11): 2'-hydroxy corresponding base
  modified_base (12)..(12): 2'-hydroxy corresponding base
  modified_base (13)..(13): 2'-hydroxy corresponding base
  modified_base (14)..(14): 2'-hydroxy corresponding base
  modified_base (15)..(15): 2'-hydroxy corresponding base
  modified_base (16)..(16): 2'-hydroxy corresponding base
  modified_base (17)..(17): 2'-hydroxy corresponding base
  modified_base (18)..(18): 2'-hydroxy corresponding base
  modified_base (19)..(19): 2'-hydroxy corresponding base
  modified_base (20)..(20): deoxythymidine
  modified_base (21)..(21): deoxythymidine
gauuaauggaggcuuagcutt

SEQ ID NO: 970 - DNA, 21 bp, Artificial Sequence
  Description of Artificial Sequence: Synthetic oligonucleotide
  Description of Combined DNA/RNA Molecule: Synthetic oligonucleotide
  siRNAs to PCSK9
  modified_base (1)..(1): 2'-hydroxy corresponding base
  modified_base (2)..(2): 2'-hydroxy corresponding base
  modified_base (3)..(3): 2'-hydroxy corresponding base
  modified_base (4)..(4): 2'-hydroxy corresponding base
  modified_base (5)..(5): 2'-hydroxy corresponding base
  modified_base (6)..(6): 2'-hydroxy corresponding base
  modified_base (7)..(7): 2'-hydroxy corresponding base
  modified_base (8)..(8): 2'-hydroxy corresponding base
  modified_base (9)..(9): 2'-hydroxy corresponding base
  modified_base (10)..(10): 2'-hydroxy corresponding base
  modified_base (11)..(11): 2'-hydroxy corresponding base
  modified_base (12)..(12): 2'-hydroxy corresponding base
  modified_base (13)..(13): 2'-hydroxy corresponding base
  modified_base (14)..(14): 2'-hydroxy corresponding base
  modified_base (15)..(15): 2'-hydroxy corresponding base
  modified_base (16)..(16): 2'-hydroxy corresponding base
  modified_base (17)..(17): 2'-hydroxy corresponding base
  modified_base (18)..(18): 2'-hydroxy corresponding base
  modified_base (19)..(19): 2'-hydroxy corresponding base
  modified_base (20)..(20): deoxythymidine
  modified_base (21)..(21): deoxythymidine
agcuaagccuccauuaauctt

SEQ ID NO: 971 - DNA, 21 bp, Artificial Sequence
  Description of Artificial Sequence: Synthetic oligonucleotide
  Description of Combined DNA/RNA Molecule: Synthetic oligonucleotide
  siRNAs to PCSK9
  modified_base (1)..(1): 2'-hydroxy corresponding base
  modified_base (2)..(2): 2'-hydroxy corresponding base
  modified_base (3)..(3): 2'-hydroxy corresponding base
  modified_base (4)..(4): 2'-hydroxy corresponding base
  modified_base (5)..(5): 2'-hydroxy corresponding base
  modified_base (6)..(6): 2'-hydroxy corresponding base
  modified_base (7)..(7): 2'-hydroxy corresponding base
  modified_base (8)..(8): 2'-hydroxy corresponding base
  modified_base (9)..(9): 2'-hydroxy corresponding base
  modified_base (10)..(10): 2'-hydroxy corresponding base
  modified_base (11)..(11): 2'-hydroxy corresponding base
  modified_base (12)..(12): 2'-hydroxy corresponding base
  modified_base (13)..(13): 2'-hydroxy corresponding base
  modified_base (14)..(14): 2'-hydroxy corresponding base
  modified_base (15)..(15): 2'-hydroxy corresponding base
  modified_base (16)..(16): 2'-hydroxy corresponding base
  modified_base (17)..(17): 2'-hydroxy corresponding base
  modified_base (18)..(18): 2'-hydroxy corresponding base
  modified_base (19)..(19): 2'-hydroxy corresponding base
  modified_base (20)..(20): deoxythymidine
  modified_base (21)..(21): deoxythymidine
auuaauggaggcuuagcuutt

SEQ ID NO: 972 - DNA, 21 bp, Artificial Sequence
  Description of Artificial Sequence: Synthetic oligonucleotide
  Description of Combined DNA/RNA Molecule: Synthetic oligonucleotide
  siRNAs to PCSK9
  modified_base (1)..(1): 2'-hydroxy corresponding base
  modified_base (2)..(2): 2'-hydroxy corresponding base
  modified_base (3)..(3): 2'-hydroxy corresponding base
  modified_base (4)..(4): 2'-hydroxy corresponding base
  modified_base (5)..(5): 2'-hydroxy corresponding base
  modified_base (6)..(6): 2'-hydroxy corresponding base
  modified_base (7)..(7): 2'-hydroxy corresponding base
  modified_base (8)..(8): 2'-hydroxy corresponding base
  modified_base (9)..(9): 2'-hydroxy corresponding base
  modified_base (10)..(10): 2'-hydroxy corresponding base
  modified_base (11)..(11): 2'-hydroxy corresponding base
  modified_base (12)..(12): 2'-hydroxy corresponding base
  modified_base (13)..(13): 2'-hydroxy corresponding base
  modified_base (14)..(14): 2'-hydroxy corresponding base
  modified_base (15)..(15): 2'-hydroxy corresponding base
  modified_base (16)..(16): 2'-hydroxy corresponding base
  modified_base (17)..(17): 2'-hydroxy corresponding base
  modified_base (18)..(18): 2'-hydroxy corresponding base
  modified_base (19)..(19): 2'-hydroxy corresponding base
  modified_base (20)..(20): deoxythymidine
  modified_base (21)..(21): deoxythymidine
aagcuaagccuccauuaautt

SEQ ID NO: 973 - DNA, 21 bp, Artificial Sequence
  Description of Artificial Sequence: Synthetic oligonucleotide
  Description of Combined DNA/RNA Molecule: Synthetic oligonucleotide
  siRNAs to PCSK9
  modified_base (1)..(1): 2'-hydroxy corresponding base
  modified_base (2)..(2): 2'-hydroxy corresponding base
  modified_base (3)..(3): 2'-hydroxy corresponding base
  modified_base (4)..(4): 2'-hydroxy corresponding base
  modified_base (5)..(5): 2'-hydroxy corresponding base
  modified_base (6)..(6): 2'-hydroxy corresponding base
  modified_base (7)..(7): 2'-hydroxy corresponding base
  modified_base (8)..(8): 2'-hydroxy corresponding base
  modified_base (9)..(9): 2'-hydroxy corresponding base
  modified_base (10)..(10): 2'-hydroxy corresponding base
  modified_base (11)..(11): 2'-hydroxy corresponding base
  modified_base (12)..(12): 2'-hydroxy corresponding base
  modified_base (13)..(13): 2'-hydroxy corresponding base
  modified_base (14)..(14): 2'-hydroxy corresponding base
  modified_base (15)..(15): 2'-hydroxy corresponding base
  modified_base (16)..(16): 2'-hydroxy corresponding base
  modified_base (17)..(17): 2'-hydroxy corresponding base
  modified_base (18)..(18): 2'-hydroxy corresponding base
  modified_base (19)..(19): 2'-hydroxy corresponding base
  modified_base (20)..(20): deoxythymidine
  modified_base (21)..(21): deoxythymidine
uuaauggaggcuuagcuuutt

SEQ ID NO: 974 - DNA, 21 bp, Artificial Sequence
  Description of Artificial Sequence: Synthetic oligonucleotide
  Description of Combined DNA/RNA Molecule: Synthetic oligonucleotide
  siRNAs to PCSK9
  modified_base (1)..(1): 2'-hydroxy corresponding base
  modified_base (2)..(2): 2'-hydroxy corresponding base
  modified_base (3)..(3): 2'-hydroxy corresponding base
  modified_base (4)..(4): 2'-hydroxy corresponding base
  modified_base (5)..(5): 2'-hydroxy corresponding base
  modified_base (6)..(6): 2'-hydroxy corresponding base
  modified_base (7)..(7): 2'-hydroxy corresponding base
  modified_base (8)..(8): 2'-hydroxy corresponding base
  modified_base (9)..(9): 2'-hydroxy corresponding base
  modified_base (10)..(10): 2'-hydroxy corresponding base
  modified_base (11)..(11): 2'-hydroxy corresponding base
  modified_base (12)..(12): 2'-hydroxy corresponding base
  modified_base (13)..(13): 2'-hydroxy corresponding base
  modified_base (14)..(14): 2'-hydroxy corresponding base
  modified_base (15)..(15): 2'-hydroxy corresponding base
  modified_base (16)..(16): 2'-hydroxy corresponding base
  modified_base (17)..(17): 2'-hydroxy corresponding base
  modified_base (18)..(18): 2'-hydroxy corresponding base
  modified_base (19)..(19): 2'-hydroxy corresponding base
  modified_base (20)..(20): deoxythymidine
  modified_base (21)..(21): deoxythymidine
aaagcuaagccuccauuaatt

SEQ ID NO: 975 - DNA, 21 bp, Artificial Sequence
  Description of Artificial Sequence: Synthetic oligonucleotide
  Description of Combined DNA/RNA Molecule: Synthetic oligonucleotide
  siRNAs to PCSK9
  modified_base (1)..(1): 2'-hydroxy corresponding base
  modified_base (2)..(2): 2'-hydroxy corresponding base
  modified_base (3)..(3): 2'-hydroxy corresponding base
  modified_base (4)..(4): 2'-hydroxy corresponding base
  modified_base (5)..(5): 2'-hydroxy corresponding base
  modified_base (6)..(6): 2'-hydroxy corresponding base
  modified_base (7)..(7): 2'-hydroxy corresponding base
  modified_base (8)..(8): 2'-hydroxy corresponding base
  modified_base (9)..(9): 2'-hydroxy corresponding base
  modified_base (10)..(10): 2'-hydroxy corresponding base
  modified_base (11)..(11): 2'-hydroxy corresponding base
  modified_base (12)..(12): 2'-hydroxy corresponding base
  modified_base (13)..(13): 2'-hydroxy corresponding base
  modified_base (14)..(14): 2'-hydroxy corresponding base
  modified_base (15)..(15): 2'-hydroxy corresponding base
  modified_base (16)..(16): 2'-hydroxy corresponding base
  modified_base (17)..(17): 2'-hydroxy corresponding base
  modified_base (18)..(18): 2'-hydroxy corresponding base
  modified_base (19)..(19): 2'-hydroxy corresponding base
  modified_base (20)..(20): deoxythymidine
  modified_base (21)..(21): 5'-thio thymidine
uuucuggauggcaucuagctt

SEQ ID NO: 976 - DNA, 21 bp, Artificial Sequence
  Description of Artificial Sequence: Synthetic oligonucleotide
  Description of Combined DNA/RNA Molecule: Synthetic oligonucleotide
  siRNAs to PCSK9
  modified_base (1)..(1): 2'-hydroxy corresponding base
  modified_base (2)..(2): 2'-hydroxy corresponding base
  modified_base (3)..(3): 2'-hydroxy corresponding base
  modified_base (4)..(4): 2'-hydroxy corresponding base
  modified_base (5)..(5): 2'-hydroxy corresponding base
  modified_base (6)..(6): 2'-hydroxy corresponding base
  modified_base (7)..(7): 2'-hydroxy corresponding base
  modified_base (8)..(8): 2'-hydroxy corresponding base
  modified_base (9)..(9): 2'-hydroxy corresponding base
  modified_base (10)..(10): 2'-hydroxy corresponding base
  modified_base (11)..(11): 2'-hydroxy corresponding base
  modified_base (12)..(12): 2'-hydroxy corresponding base
  modified_base (13)..(13): 2'-hydroxy corresponding base
  modified_base (14)..(14): 2'-hydroxy corresponding base
  modified_base (15)..(15): 2'-hydroxy corresponding base
  modified_base (16)..(16): 2'-hydroxy corresponding base
  modified_base (17)..(17): 2'-hydroxy corresponding base
  modified_base (18)..(18): 2'-hydroxy corresponding base
  modified_base (19)..(19): 2'-hydroxy corresponding base
  modified_base (20)..(20): deoxythymidine
  modified_base (21)..(21): 5'-thio thymidine
gcuagaugccauccagaaatt

SEQ ID NO: 977 - DNA, 21 bp, Artificial Sequence
  Description of Artificial Sequence: Synthetic oligonucleotide
  Description of Combined DNA/RNA Molecule: Synthetic oligonucleotide
  siRNAs to PCSK9
  modified_base (1)..(1): 2'-O-methyl corresponding base
  modified_base (2)..(2): 2'-O-methyl corresponding base
  modified_base (3)..(3): 2'-O-methyl corresponding base
  modified_base (4)..(4): 2'-O-methyl corresponding base
  modified_base (5)..(5): 2'-O-methyl corresponding base
  modified_base (6)..(6): 2'-hydroxy corresponding base
  modified_base (7)..(7): 2'-hydroxy corresponding base
  modified_base (8)..(8): 2'-hydroxy corresponding base
  modified_base (9)..(9): 2'-O-methyl corresponding base
  modified_base (10)..(10): 2'-hydroxy corresponding base
  modified_base (11)..(11): 2'-hydroxy corresponding base
  modified_base (12)..(12): 2'-O-methyl corresponding base
  modified_base (13)..(13): 2'-hydroxy corresponding base
  modified_base (14)..(14): 2'-O-methyl corresponding base
  modified_base (15)..(15): 2'-O-methyl corresponding base
  modified_base (16)..(16): 2'-O-methyl corresponding base
  modified_base (17)..(17): 2'-hydroxy corresponding base
  modified_base (18)..(18): 2'-hydroxy corresponding base
  modified_base (19)..(19): 2'-O-methyl corresponding base
  modified_base (20)..(20): deoxythymidine
  modified_base (21)..(21): 5'-thio thymidine
uuucuggauggcaucuagctt

SEQ ID NO: 978 - DNA, 21 bp, Artificial Sequence
  Description of Artificial Sequence: Synthetic oligonucleotide
  Description of Combined DNA/RNA Molecule: Synthetic oligonucleotide
  siRNAs to PCSK9
  modified_base (1)..(1): 2'-hydroxy corresponding base
  modified_base (2)..(2): 2'-hydroxy corresponding base
  modified_base (3)..(3): 2'-O-methyl corresponding base
  modified_base (4)..(4): 2'-hydroxy corresponding base
  modified_base (5)..(5): 2'-hydroxy corresponding base
  modified_base (6)..(6): 2'-hydroxy corresponding base
  modified_base (7)..(7): 2'-hydroxy corresponding base
  modified_base (8)..(8): 2'-hydroxy corresponding base
  modified_base (9)..(9): 2'-hydroxy corresponding base
  modified_base (10)..(10): 2'-O-methyl corresponding base
  modified_base (11)..(11): 2'-hydroxy corresponding base
  modified_base (12)..(12): 2'-hydroxy corresponding base
  modified_base (13)..(13): 2'-hydroxy corresponding base
  modified_base (14)..(14): 2'-O-methyl corresponding base
  modified_base (15)..(15): 2'-hydroxy corresponding base
  modified_base (16)..(16): 2'-hydroxy corresponding base
  modified_base (17)..(17): 2'-hydroxy corresponding base
  modified_base (18)..(18): 2'-hydroxy corresponding base
  modified_base (19)..(19): 2'-hydroxy corresponding base
  modified_base (20)..(20): deoxythymidine
  modified_base (21)..(21): 5'-thio thymidine
gcuagaugccauccagaaatt

SEQ ID NO: 979 - DNA, 21 bp, Artificial Sequence
  Description of Artificial Sequence: Synthetic oligonucleotide
  Description of Combined DNA/RNA Molecule: Synthetic oligonucleotide
  siRNAs to PCSK9
  modified_base (1)..(1): 2'-hydroxy corresponding base
  modified_base (2)..(2): 2'-hydroxy corresponding base
  modified_base (3)..(3): 2'-hydroxy corresponding base
  modified_base (4)..(4): 2'-hydroxy corresponding base
  modified_base (5)..(5): 2'-hydroxy corresponding base
  modified_base (6)..(6): 2'-hydroxy corresponding base
  modified_base (7)..(7): 2'-hydroxy corresponding base
  modified_base (8)..(8): 2'-hydroxy corresponding base
  modified_base (9)..(9): 2'-hydroxy corresponding base
  modified_base (10)..(10): 2'-hydroxy corresponding base
  modified_base (11)..(11): 2'-hydroxy corresponding base
  modified_base (12)..(12): 2'-hydroxy corresponding base
  modified_base (13)..(13): 2'-hydroxy corresponding base
  modified_base (14)..(14): 2'-hydroxy corresponding base
  modified_base (15)..(15): 2'-hydroxy corresponding base
  modified_base (16)..(16): 2'-hydroxy corresponding base
  modified_base (17)..(17): 2'-hydroxy corresponding base
  modified_base (18)..(18): 2'-hydroxy corresponding base
  modified_base (19)..(19): 2'-hydroxy corresponding base
  modified_base (20)..(20): deoxythymidine
  modified_base (21)..(21): 5'-thio thymidine
uucuggauggcaucuagcctt

SEQ ID NO: 980 - DNA, 21 bp, Artificial Sequence
  Description of Artificial Sequence: Synthetic oligonucleotide
  Description of Combined DNA/RNA Molecule: Synthetic oligonucleotide
  siRNAs to PCSK9
  modified_base (1)..(1): 2'-hydroxy corresponding base
  modified_base (2)..(2): 2'-hydroxy corresponding base
  modified_base (3)..(3): 2'-hydroxy corresponding base
  modified_base (4)..(4): 2'-hydroxy corresponding base
  modified_base (5)..(5): 2'-hydroxy corresponding base
  modified_base (6)..(6): 2'-hydroxy corresponding base
  modified_base (7)..(7): 2'-hydroxy corresponding base
  modified_base (8)..(8): 2'-hydroxy corresponding base
  modified_base (9)..(9): 2'-hydroxy corresponding base
  modified_base (10)..(10): 2'-hydroxy corresponding base
  modified_base (11)..(11): 2'-hydroxy corresponding base
  modified_base (12)..(12): 2'-hydroxy corresponding base
  modified_base (13)..(13): 2'-hydroxy corresponding base
  modified_base (14)..(14): 2'-hydroxy corresponding base
  modified_base (15)..(15): 2'-hydroxy corresponding base
  modified_base (16)..(16): 2'-hydroxy corresponding base
  modified_base (17)..(17): 2'-hydroxy corresponding base
  modified_base (18)..(18): 2'-hydroxy corresponding base
  modified_base (19)..(19): 2'-hydroxy corresponding base
  modified_base (20)..(20): deoxythymidine
  modified_base (21)..(21): 5'-thio thymidine
ggcuagaugccauccagaatt

SEQ ID NO: 981 - DNA, 21 bp, Artificial Sequence
  Description of Artificial Sequence: Synthetic oligonucleotide
  Description of Combined DNA/RNA Molecule: Synthetic oligonucleotide
  siRNAs to PCSK9
  modified_base (1)..(1): 2'-O-methyl corresponding base
  modified_base (2)..(2): 2'-O-methyl corresponding base
  modified_base (3)..(3): 2'-O-methyl corresponding base
  modified_base (4)..(4): 2'-O-methyl corresponding base
  modified_base (5)..(5): 2'-hydroxy corresponding base
  modified_base (6)..(6): 2'-hydroxy corresponding base
  modified_base (7)..(7): 2'-hydroxy corresponding base
  modified_base (8)..(8): 2'-O-methyl corresponding base
  modified_base (9)..(9): 2'-hydroxy corresponding base
  modified_base (10)..(10): 2'-hydroxy corresponding base
  modified_base (11)..(11): 2'-O-methyl corresponding base
  modified_base (12)..(12): 2'-hydroxy corresponding base
  modified_base (13)..(13): 2'-O-methyl corresponding base
  modified_base (14)..(14): 2'-O-methyl corresponding base
  modified_base (15)..(15): 2'-O-methyl corresponding base
  modified_base (16)..(16): 2'-hydroxy corresponding base
  modified_base (17)..(17): 2'-hydroxy corresponding base
  modified_base (18)..(18): 2'-O-methyl corresponding base
  modified_base (19)..(19): 2'-O-methyl corresponding base
  modified_base (20)..(20): deoxythymidine
  modified_base (21)..(21): 5'-thio thymidine
uucuggauggcaucuagcctt

SEQ ID NO: 982 - DNA, 21 bp, Artificial Sequence
  Description of Artificial Sequence: Synthetic oligonucleotide
  Description of Combined DNA/RNA Molecule: Synthetic oligonucleotide
  siRNAs to PCSK9
  modified_base (1)..(1): 2'-hydroxy corresponding base
  modified_base (2)..(2): 2'-hydroxy corresponding base
  modified_base (3)..(3): 2'-hydroxy corresponding base
  modified_base (4)..(4): 2'-O-methyl corresponding base
  modified_base (5)..(5): 2'-hydroxy corresponding base
  modified_base (6)..(6): 2'-hydroxy corresponding base
  modified_base (7)..(7): 2'-hydroxy corresponding base
  modified_base (8)..(8): 2'-hydroxy corresponding base
  modified_base (9)..(9): 2'-hydroxy corresponding base
  modified_base (10)..(10): 2'-hydroxy corresponding base
  modified_base (11)..(11): 2'-O-methyl corresponding base
  modified_base (12)..(12): 2'-hydroxy corresponding base
  modified_base (13)..(13): 2'-hydroxy corresponding base
  modified_base (14)..(14): 2'-hydroxy corresponding base
  modified_base (15)..(15): 2'-O-methyl corresponding base
  modified_base (16)..(16): 2'-hydroxy corresponding base
  modified_base (17)..(17): 2'-hydroxy corresponding base
  modified_base (18)..(18): 2'-hydroxy corresponding base
  modified_base (19)..(19): 2'-hydroxy corresponding base
  modified_base (20)..(20): deoxythymidine
  modified_base (21)..(21): 5'-thio thymidine
ggcuagaugccauccagaatt

SEQ ID NO: 983 - DNA, 21 bp, Artificial Sequence
  Description of Artificial Sequence: Synthetic oligonucleotide
  Description of Combined DNA/RNA Molecule: Synthetic oligonucleotide
  siRNAs to PCSK9
  modified_base (1)..(1): 2'-hydroxy corresponding base
  modified_base (2)..(2): 2'-hydroxy corresponding base
  modified_base (3)..(3): 2'-hydroxy corresponding base
  modified_base (4)..(4): 2'-hydroxy corresponding base
  modified_base (5)..(5): 2'-hydroxy corresponding base
  modified_base (6)..(6): 2'-hydroxy corresponding base
  modified_base (7)..(7): 2'-hydroxy corresponding base
  modified_base (8)..(8): 2'-hydroxy corresponding base
  modified_base (9)..(9): 2'-hydroxy corresponding base
  modified_base (10)..(10): 2'-hydroxy corresponding base
  modified_base (11)..(11): 2'-hydroxy corresponding base
  modified_base (12)..(12): 2'-hydroxy corresponding base
  modified_base (13)..(13): 2'-hydroxy corresponding base
  modified_base (14)..(14): 2'-hydroxy corresponding base
  modified_base (15)..(15): 2'-hydroxy corresponding base
  modified_base (16)..(16): 2'-hydroxy corresponding base
  modified_base (17)..(17): 2'-hydroxy corresponding base
  modified_base (18)..(18): 2'-hydroxy corresponding base
  modified_base (19)..(19): 2'-hydroxy corresponding base
  modified_base (20)..(20): deoxythymidine
  modified_base (21)..(21): 5'-thio thymidine
ucuggauggcaucuagccatt

SEQ ID NO: 984 - DNA, 21 bp, Artificial Sequence
  Description of Artificial Sequence: Synthetic oligonucleotide
  Description of Combined DNA/RNA Molecule: Synthetic oligonucleotide
  siRNAs to PCSK9
  modified_base (1)..(1): 2'-hydroxy corresponding base
  modified_base (2)..(2): 2'-hydroxy corresponding base
  modified_base (3)..(3): 2'-hydroxy corresponding base
  modified_base (4)..(4): 2'-hydroxy corresponding base
  modified_base (5)..(5): 2'-hydroxy corresponding base
  modified_base (6)..(6): 2'-hydroxy corresponding base
  modified_base (7)..(7): 2'-hydroxy corresponding base
  modified_base (8)..(8): 2'-hydroxy corresponding base
  modified_base (9)..(9): 2'-hydroxy corresponding base
  modified_base (10)..(10): 2'-hydroxy corresponding base
  modified_base (11)..(11): 2'-hydroxy corresponding base
  modified_base (12)..(12): 2'-hydroxy corresponding base
  modified_base (13)..(13): 2'-hydroxy corresponding base
  modified_base (14)..(14): 2'-hydroxy corresponding base
  modified_base (15)..(15): 2'-hydroxy corresponding base
  modified_base (16)..(16): 2'-hydroxy corresponding base
  modified_base (17)..(17): 2'-hydroxy corresponding base
  modified_base (18)..(18): 2'-hydroxy corresponding base
  modified_base (19)..(19): 2'-hydroxy corresponding base
  modified_base (20)..(20): deoxythymidine
  modified_base (21)..(21): 5'-thio thymidine
uggcuagaugccauccagatt

SEQ ID NO: 985 - DNA, 21 bp, Artificial Sequence
  Description of Artificial Sequence: Synthetic oligonucleotide
  Description of Combined DNA/RNA Molecule: Synthetic oligonucleotide
  siRNAs to PCSK9
  modified_base (1)..(1): 2'-O-methyl corresponding base
  modified_base (2)..(2): 2'-O-methyl corresponding base
  modified_base (3)..(3): 2'-O-methyl corresponding base
  modified_base (4)..(4): 2'-hydroxy corresponding base
  modified_base (5)..(5): 2'-hydroxy corresponding base
  modified_base (6)..(6): 2'-hydroxy corresponding base
  modified_base (7)..(7): 2'-O-methyl corresponding base
  modified_base (8)..(8): 2'-hydroxy corresponding base
  modified_base (9)..(9): 2'-hydroxy corresponding base
  modified_base (10)..(10): 2'-O-methyl corresponding base
  modified_base (11)..(11): 2'-hydroxy corresponding base
  modified_base (12)..(12): 2'-O-methyl corresponding base
  modified_base (13)..(13): 2'-O-methyl corresponding base
  modified_base (14)..(14): 2'-O-methyl corresponding base
  modified_base (15)..(15): 2'-hydroxy corresponding base
  modified_base (16)..(16): 2'-hydroxy corresponding base
  modified_base (17)..(17): 2'-O-methyl corresponding base
  modified_base (18)..(18): 2'-O-methyl corresponding base
  modified_base (19)..(19): 2'-hydroxy corresponding base
  modified_base (20)..(20): deoxythymidine
  modified_base (21)..(21): 5'-thio thymidine
ucuggauggcaucuagccatt

SEQ ID NO: 986 - DNA, 21 bp, Artificial Sequence
  Description of Artificial Sequence: Synthetic oligonucleotide
  Description of Combined DNA/RNA Molecule: Synthetic oligonucleotide
  siRNAs to PCSK9
  modified_base (1)..(1): 2'-hydroxy corresponding base
  modified_base (2)..(2): 2'-hydroxy corresponding base
  modified_base (3)..(3): 2'-hydroxy corresponding base
  modified_base (4)..(4): 2'-hydroxy corresponding base
  modified_base (5)..(5): 2'-O-methyl corresponding base
  modified_base (6)..(6): 2'-hydroxy corresponding base
  modified_base (7)..(7): 2'-hydroxy corresponding base
  modified_base (8)..(8): 2'-hydroxy corresponding base
  modified_base (9)..(9): 2'-hydroxy corresponding base
  modified_base (10)..(10): 2'-hydroxy corresponding base
  modified_base (11)..(11): 2'-hydroxy corresponding base
  modified_base (12)..(12): 2'-O-methyl corresponding base
  modified_base (13)..(13): 2'-hydroxy corresponding base
  modified_base (14)..(14): 2'-hydroxy corresponding base
  modified_base (15)..(15): 2'-hydroxy corresponding base
  modified_base (16)..(16): 2'-O-methyl corresponding base
  modified_base (17)..(17): 2'-hydroxy corresponding base
  modified_base (18)..(18): 2'-hydroxy corresponding base
  modified_base (19)..(19): 2'-hydroxy corresponding base
  modified_base (20)..(20): deoxythymidine
  modified_base (21)..(21): 5'-thio thymidine
uggcuagaugccauccagatt

SEQ ID NO: 987 - DNA, 21 bp, Artificial Sequence
  Description of Artificial Sequence: Synthetic oligonucleotide
  Description of Combined DNA/RNA Molecule: Synthetic oligonucleotide
  siRNAs to PCSK9
  modified_base (1)..(1): 2'-hydroxy corresponding base
  modified_base (2)..(2): 2'-hydroxy corresponding base
  modified_base (3)..(3): 2'-hydroxy corresponding base
  modified_base (4)..(4): 2'-hydroxy corresponding base
  modified_base (5)..(5): 2'-hydroxy corresponding base
  modified_base (6)..(6): 2'-hydroxy corresponding base
  modified_base (7)..(7): 2'-hydroxy corresponding base
  modified_base (8)..(8): 2'-hydroxy corresponding base
  modified_base (9)..(9): 2'-hydroxy corresponding base
  modified_base (10)..(10): 2'-hydroxy corresponding base
  modified_base (11)..(11): 2'-hydroxy corresponding base
  modified_base (12)..(12): 2'-hydroxy corresponding base
  modified_base (13)..(13): 2'-hydroxy corresponding base
  modified_base (14)..(14): 2'-hydroxy corresponding base
  modified_base (15)..(15): 2'-hydroxy corresponding base
  modified_base (16)..(16): 2'-hydroxy corresponding base
  modified_base (17)..(17): 2'-hydroxy corresponding base
  modified_base (18)..(18): 2'-hydroxy corresponding base
  modified_base (19)..(19): 2'-hydroxy corresponding base
  modified_base (20)..(20): deoxythymidine
  modified_base (21)..(21): deoxythymidine
aggcuggagacaggugcgctt

SEQ ID NO: 988 - DNA, 21 bp, Artificial Sequence
  Description of Artificial Sequence: Synthetic oligonucleotide
  Description of Combined DNA/RNA Molecule: Synthetic oligonucleotide
  siRNAs to PCSK9
  modified_base (1)..(1): 2'-hydroxy corresponding base
  modified_base (2)..(2): 2'-hydroxy corresponding base
  modified_base (3)..(3): 2'-hydroxy corresponding base
  modified_base (4)..(4): 2'-hydroxy corresponding base
  modified_base (5)..(5): 2'-hydroxy corresponding base
  modified_base (6)..(6): 2'-hydroxy corresponding base
  modified_base (7)..(7): 2'-hydroxy corresponding base
  modified_base (8)..(8): 2'-hydroxy corresponding base
  modified_base (9)..(9): 2'-hydroxy corresponding base
  modified_base (10)..(10): 2'-hydroxy corresponding base
  modified_base (11)..(11): 2'-hydroxy corresponding base
  modified_base (12)..(12): 2'-hydroxy corresponding base
  modified_base (13)..(13): 2'-hydroxy corresponding base
  modified_base (14)..(14): 2'-hydroxy corresponding base
  modified_base (15)..(15): 2'-hydroxy corresponding base
  modified_base (16)..(16): 2'-hydroxy corresponding base
  modified_base (17)..(17): 2'-hydroxy corresponding base
  modified_base (18)..(18): 2'-hydroxy corresponding base
  modified_base (19)..(19): 2'-hydroxy corresponding base
  modified_base (20)..(20): deoxythymidine
  modified_base (21)..(21): deoxythymidine
gcgcaccugucuccagccutt

SEQ ID NO: 989 - DNA, 21 bp, Artificial Sequence
  Description of Artificial Sequence: Synthetic oligonucleotide
  Description of Combined DNA/RNA Molecule: Synthetic oligonucleotide
  siRNAs to PCSK9
  modified_base (1)..(1): 2'-hydroxy corresponding base
  modified_base (2)..(2): 2'-hydroxy corresponding base
  modified_base (3)..(3): 2'-hydroxy corresponding base
  modified_base (4)..(4): 2'-hydroxy corresponding base
  modified_base (5)..(5): 2'-hydroxy corresponding base
  modified_base (6)..(6): 2'-hydroxy corresponding base
  modified_base (7)..(7): 2'-hydroxy corresponding base
  modified_base (8)..(8): 2'-hydroxy corresponding base
  modified_base (9)..(9): 2'-hydroxy corresponding base
  modified_base (10)..(10): 2'-hydroxy corresponding base
  modified_base (11)..(11): 2'-hydroxy corresponding base
  modified_base (12)..(12): 2'-hydroxy corresponding base
  modified_base (13)..(13): 2'-hydroxy corresponding base
  modified_base (14)..(14): 2'-hydroxy corresponding base
  modified_base (15)..(15): 2'-hydroxy corresponding base
  modified_base (16)..(16): 2'-hydroxy corresponding base
  modified_base (17)..(17): 2'-hydroxy corresponding base
  modified_base (18)..(18): 2'-hydroxy corresponding base
  modified_base (19)..(19): 2'-hydroxy corresponding base
  modified_base (20)..(20): deoxythymidine
  modified_base (21)..(21): deoxythymidine
ggcuggagacaggugcgcctt

SEQ ID NO: 990 - DNA, 21 bp, Artificial Sequence
  Description of Artificial Sequence: Synthetic oligonucleotide
  Description of Combined DNA/RNA Molecule: Synthetic oligonucleotide
  siRNAs to PCSK9
  modified_base (1)..(1): 2'-hydroxy corresponding base
  modified_base (2)..(2): 2'-hydroxy corresponding base
  modified_base (3)..(3): 2'-hydroxy corresponding base
  modified_base (4)..(4): 2'-hydroxy corresponding base
  modified_base (5)..(5): 2'-hydroxy corresponding base
  modified_base (6)..(6): 2'-hydroxy corresponding base
  modified_base (7)..(7): 2'-hydroxy corresponding base
  modified_base (8)..(8): 2'-hydroxy corresponding base
  modified_base (9)..(9): 2'-hydroxy corresponding base
  modified_base (10)..(10): 2'-hydroxy corresponding base
  modified_base (11)..(11): 2'-hydroxy corresponding base
  modified_base (12)..(12): 2'-hydroxy corresponding base
  modified_base (13)..(13): 2'-hydroxy corresponding base
  modified_base (14)..(14): 2'-hydroxy corresponding base
  modified_base (15)..(15): 2'-hydroxy corresponding base
  modified_base (16)..(16): 2'-hydroxy corresponding base
  modified_base (17)..(17): 2'-hydroxy corresponding base
  modified_base (18)..(18): 2'-hydroxy corresponding base
  modified_base (19)..(19): 2'-hydroxy corresponding base
  modified_base (20)..(20): deoxythymidine
  modified_base (21)..(21): deoxythymidine
ggcgcaccugucuccagcctt

SEQ ID NO: 991 - DNA, 21 bp, Artificial Sequence
  Description of Artificial Sequence: Synthetic oligonucleotide
  Description of Combined DNA/RNA Molecule: Synthetic oligonucleotide
  siRNAs to PCSK9
  modified_base (1)..(1): 2'-hydroxy corresponding base
  modified_base (2)..(2): 2'-hydroxy corresponding base
  modified_base (3)..(3): 2'-hydroxy corresponding base
  modified_base (4)..(4): 2'-hydroxy corresponding base
  modified_base (5)..(5): 2'-hydroxy corresponding base
  modified_base (6)..(6): 2'-hydroxy corresponding base
  modified_base (7)..(7): 2'-hydroxy corresponding base
  modified_base (8)..(8): 2'-hydroxy corresponding base
  modified_base (9)..(9): 2'-hydroxy corresponding base
  modified_base (10)..(10): 2'-hydroxy corresponding base
  modified_base (11)..(11): 2'-hydroxy corresponding base
  modified_base (12)..(12): 2'-hydroxy corresponding base
  modified_base (13)..(13): 2'-hydroxy corresponding base
  modified_base (14)..(14): 2'-hydroxy corresponding base
  modified_base (15)..(15): 2'-hydroxy corresponding base
  modified_base (16)..(16): 2'-hydroxy corresponding base
  modified_base (17)..(17): 2'-hydroxy corresponding base
  modified_base (18)..(18): 2'-hydroxy corresponding base
  modified_base (19)..(19): 2'-hydroxy corresponding base
  modified_base (20)..(20): deoxythymidine
  modified_base (21)..(21): deoxythymidine
gcuggagacaggugcgccctt

SEQ ID NO: 992 - DNA, 21 bp, Artificial Sequence
  Description of Artificial Sequence: Synthetic oligonucleotide
  Description of Combined DNA/RNA Molecule: Synthetic oligonucleotide
  siRNAs to PCSK9
  modified_base (1)..(1): 2'-hydroxy corresponding base
  modified_base (2)..(2): 2'-hydroxy corresponding base
  modified_base (3)..(3): 2'-hydroxy corresponding base
  modified_base (4)..(4): 2'-hydroxy corresponding base
  modified_base (5)..(5): 2'-hydroxy corresponding base
  modified_base (6)..(6): 2'-hydroxy corresponding base
  modified_base (7)..(7): 2'-hydroxy corresponding base
  modified_base (8)..(8): 2'-hydroxy corresponding base
  modified_base (9)..(9): 2'-hydroxy corresponding base
  modified_base (10)..(10): 2'-hydroxy corresponding base
  modified_base (11)..(11): 2'-hydroxy corresponding base
  modified_base (12)..(12): 2'-hydroxy corresponding base
  modified_base (13)..(13): 2'-hydroxy corresponding base
  modified_base (14)..(14): 2'-hydroxy corresponding base
  modified_base (15)..(15): 2'-hydroxy corresponding base
  modified_base (16)..(16): 2'-hydroxy corresponding base
  modified_base (17)..(17): 2'-hydroxy corresponding base
  modified_base (18)..(18): 2'-hydroxy corresponding base
  modified_base (19)..(19): 2'-hydroxy corresponding base
  modified_base (20)..(20): deoxythymidine
  modified_base (21)..(21): deoxythymidine
gggcgcaccugucuccagctt

SEQ ID NO: 993 - DNA, 21 bp, Artificial Sequence
  Description of Artificial Sequence: Synthetic oligonucleotide
  Description of Combined DNA/RNA Molecule: Synthetic oligonucleotide
  siRNAs to PCSK9
  modified_base (1)..(1): 2'-hydroxy corresponding base
  modified_base (2)..(2): 2'-hydroxy corresponding base
  modified_base (3)..(3): 2'-hydroxy corresponding base
  modified_base (4)..(4): 2'-hydroxy corresponding base
  modified_base (5)..(5): 2'-hydroxy corresponding base
  modified_base (6)..(6): 2'-hydroxy corresponding base
  modified_base (7)..(7): 2'-hydroxy corresponding base
  modified_base (8)..(8): 2'-hydroxy corresponding base
  modified_base (9)..(9): 2'-hydroxy corresponding base
  modified_base (10)..(10): 2'-hydroxy corresponding base
  modified_base (11)..(11): 2'-hydroxy corresponding base
  modified_base (12)..(12): 2'-hydroxy corresponding base
  modified_base (13)..(13): 2'-hydroxy corresponding base
  modified_base (14)..(14): 2'-hydroxy corresponding base
  modified_base (15)..(15): 2'-hydroxy corresponding base
  modified_base (16)..(16): 2'-hydroxy corresponding base
  modified_base (17)..(17): 2'-hydroxy corresponding base
  modified_base (18)..(18): 2'-hydroxy corresponding base
  modified_base (19)..(19): 2'-hydroxy corresponding base
  modified_base (20)..(20): deoxythymidine
  modified_base (21)..(21): deoxythymidine
uuccugagccaccuuuacutt

SEQ ID NO: 994 - DNA, 21 bp, Artificial Sequence
  Description of Artificial Sequence: Synthetic oligonucleotide
  Description of Combined DNA/RNA Molecule: Synthetic oligonucleotide
  siRNAs to PCSK9
  modified_base (1)..(1): 2'-hydroxy corresponding base
  modified_base (2)..(2): 2'-hydroxy corresponding base
  modified_base (3)..(3): 2'-hydroxy corresponding base
  modified_base (4)..(4): 2'-hydroxy corresponding base
  modified_base (5)..(5): 2'-hydroxy corresponding base
  modified_base (6)..(6): 2'-hydroxy corresponding base
  modified_base (7)..(7): 2'-hydroxy corresponding base
  modified_base (8)..(8): 2'-hydroxy corresponding base
  modified_base (9)..(9): 2'-hydroxy corresponding base
  modified_base (10)..(10): 2'-hydroxy corresponding base
  modified_base (11)..(11): 2'-hydroxy corresponding base
  modified_base (12)..(12): 2'-hydroxy corresponding base
  modified_base (13)..(13): 2'-hydroxy corresponding base
  modified_base (14)..(14): 2'-hydroxy corresponding base
  modified_base (15)..(15): 2'-hydroxy corresponding base
  modified_base (16)..(16): 2'-hydroxy corresponding base
  modified_base (17)..(17): 2'-hydroxy corresponding base
  modified_base (18)..(18): 2'-hydroxy corresponding base
  modified_base (19)..(19): 2'-hydroxy corresponding base
  modified_base (20)..(20): deoxythymidine
  modified_base (21)..(21): deoxythymidine
aguaaagguggcucaggaatt

SEQ ID NO: 995 - DNA, 21 bp, Artificial Sequence
  Description of Artificial Sequence: Synthetic oligonucleotide
  Description of Combined DNA/RNA Molecule: Synthetic oligonucleotide
  siRNAs to PCSK9
  modified_base (1)..(1): 2'-hydroxy corresponding base
  modified_base (2)..(2): 2'-hydroxy corresponding base
  modified_base (3)..(3): 2'-hydroxy corresponding base
  modified_base (4)..(4): 2'-hydroxy corresponding base
  modified_base (5)..(5): 2'-hydroxy corresponding base
  modified_base (6)..(6): 2'-hydroxy corresponding base
  modified_base (7)..(7): 2'-hydroxy corresponding base
  modified_base (8)..(8): 2'-hydroxy corresponding base
  modified_base (9)..(9): 2'-hydroxy corresponding base
  modified_base (10)..(10): 2'-hydroxy corresponding base
  modified_base (11)..(11): 2'-hydroxy corresponding base
  modified_base (12)..(12): 2'-hydroxy corresponding base
  modified_base (13)..(13): 2'-hydroxy corresponding base
  modified_base (14)..(14): 2'-hydroxy corresponding base
  modified_base (15)..(15): 2'-hydroxy corresponding base
  modified_base (16)..(16): 2'-hydroxy corresponding base
  modified_base (17)..(17): 2'-hydroxy corresponding base
  modified_base (18)..(18): 2'-hydroxy corresponding base
  modified_base (19)..(19): 2'-hydroxy corresponding base
  modified_base (20)..(20): deoxythymidine
  modified_base (21)..(21): deoxythymidine
uccugagccaccuuuacuctt

SEQ ID NO: 996 - DNA, 21 bp, Artificial Sequence
  Description of Artificial Sequence: Synthetic oligonucleotide
  Description of Combined DNA/RNA Molecule: Synthetic oligonucleotide
  siRNAs to PCSK9
  modified_base (1)..(1): 2'-hydroxy corresponding base
  modified_base (2)..(2): 2'-hydroxy corresponding base
  modified_base (3)..(3): 2'-hydroxy corresponding base
  modified_base (4)..(4): 2'-hydroxy corresponding base
  modified_base (5)..(5): 2'-hydroxy corresponding base
  modified_base (6)..(6): 2'-hydroxy corresponding base
  modified_base (7)..(7): 2'-hydroxy corresponding base
  modified_base (8)..(8): 2'-hydroxy corresponding base
  modified_base (9)..(9): 2'-hydroxy corresponding base
  modified_base (10)..(10): 2'-hydroxy corresponding base
  modified_base (11)..(11): 2'-hydroxy corresponding base
  modified_base (12)..(12): 2'-hydroxy corresponding base
  modified_base (13)..(13): 2'-hydroxy corresponding base
  modified_base (14)..(14): 2'-hydroxy corresponding base
  modified_base (15)..(15): 2'-hydroxy corresponding base
  modified_base (16)..(16): 2'-hydroxy corresponding base
  modified_base (17)..(17): 2'-hydroxy corresponding base
  modified_base (18)..(18): 2'-hydroxy corresponding base
  modified_base (19)..(19): 2'-hydroxy corresponding base
  modified_base (20)..(20): deoxythymidine
  modified_base (21)..(21): deoxythymidine
gaguaaagguggcucaggatt

SEQ ID NO: 997 - DNA, 21 bp, Artificial Sequence
  Description of Artificial Sequence: Synthetic oligonucleotide
  Description of Combined DNA/RNA Molecule: Synthetic oligonucleotide
  siRNAs to PCSK9
  modified_base (1)..(1): 2'-hydroxy corresponding base
  modified_base (2)..(2): 2'-hydroxy corresponding base
  modified_base (3)..(3): 2'-hydroxy corresponding base
  modified_base (4)..(4): 2'-hydroxy corresponding base
  modified_base (5)..(5): 2'-hydroxy corresponding base
  modified_base (6)..(6): 2'-hydroxy corresponding base
  modified_base (7)..(7): 2'-hydroxy corresponding base
  modified_base (8)..(8): 2'-hydroxy corresponding base
  modified_base (9)..(9): 2'-hydroxy corresponding base
  modified_base (10)..(10): 2'-hydroxy corresponding base
  modified_base (11)..(11): 2'-hydroxy corresponding base
  modified_base (12)..(12): 2'-hydroxy corresponding base
  modified_base (13)..(13): 2'-hydroxy corresponding base
  modified_base (14)..(14): 2'-hydroxy corresponding base
  modified_base (15)..(15): 2'-hydroxy corresponding base
  modified_base (16)..(16): 2'-hydroxy corresponding base
  modified_base (17)..(17): 2'-hydroxy corresponding base
  modified_base (18)..(18): 2'-hydroxy corresponding base
  modified_base (19)..(19): 2'-hydroxy corresponding base
  modified_base (20)..(20): deoxythymidine
  modified_base (21)..(21): deoxythymidine
ccugagccaccuuuacucutt

SEQ ID NO: 998 - DNA, 21 bp, Artificial Sequence
  Description of Artificial Sequence: Synthetic oligonucleotide
  Description of Combined DNA/RNA Molecule: Synthetic oligonucleotide
  siRNAs to PCSK9
  modified_base (1)..(1): 2'-hydroxy corresponding base
  modified_base (2)..(2): 2'-hydroxy corresponding base
  modified_base (3)..(3): 2'-hydroxy corresponding base
  modified_base (4)..(4): 2'-hydroxy corresponding base
  modified_base (5)..(5): 2'-hydroxy corresponding base
  modified_base (6)..(6): 2'-hydroxy corresponding base
  modified_base (7)..(7): 2'-hydroxy corresponding base
  modified_base (8)..(8): 2'-hydroxy corresponding base
  modified_base (9)..(9): 2'-hydroxy corresponding base
  modified_base (10)..(10): 2'-hydroxy corresponding base
  modified_base (11)..(11): 2'-hydroxy corresponding base
  modified_base (12)..(12): 2'-hydroxy corresponding base
  modified_base (13)..(13): 2'-hydroxy corresponding base
  modified_base (14)..(14): 2'-hydroxy corresponding base
  modified_base (15)..(15): 2'-hydroxy corresponding base
  modified_base (16)..(16): 2'-hydroxy corresponding base
  modified_base (17)..(17): 2'-hydroxy corresponding base
  modified_base (18)..(18): 2'-hydroxy corresponding base
  modified_base (19)..(19): 2'-hydroxy corresponding base
  modified_base (20)..(20): deoxythymidine
  modified_base (21)..(21): deoxythymidine
agaguaaagguggcucaggtt

SEQ ID NO: 999 - DNA, 21 bp, Artificial Sequence
  Description of Artificial Sequence: Synthetic oligonucleotide
  Description of Combined DNA/RNA Molecule: Synthetic oligonucleotide
  siRNAs to PCSK9
  modified_base (1)..(1): 2'-hydroxy corresponding base
  modified_base (2)..(2): 2'-hydroxy corresponding base
  modified_base (3)..(3): 2'-hydroxy corresponding base
  modified_base (4)..(4): 2'-hydroxy corresponding base
  modified_base (5)..(5): 2'-hydroxy corresponding base
  modified_base (6)..(6): 2'-hydroxy corresponding base
  modified_base (7)..(7): 2'-hydroxy corresponding base
  modified_base (8)..(8): 2'-hydroxy corresponding base
  modified_base (9)..(9): 2'-hydroxy corresponding base
  modified_base (10)..(10): 2'-hydroxy corresponding base
  modified_base (11)..(11): 2'-hydroxy corresponding base
  modified_base (12)..(12): 2'-hydroxy corresponding base
  modified_base (13)..(13): 2'-hydroxy corresponding base
  modified_base (14)..(14): 2'-hydroxy corresponding base
  modified_base (15)..(15): 2'-hydroxy corresponding base
  modified_base (16)..(16): 2'-hydroxy corresponding base
  modified_base (17)..(17): 2'-hydroxy corresponding base
  modified_base (18)..(18): 2'-hydroxy corresponding base
  modified_base (19)..(19): 2'-hydroxy corresponding base
  modified_base (20)..(20): deoxythymidine
  modified_base (21)..(21): deoxythymidine
ugagccaccuuuacucugctt

SEQ ID NO: 1000 - DNA, 21 bp, Artificial Sequence
  Description of Artificial Sequence: Synthetic oligonucleotide
  Description of Combined DNA/RNA Molecule: Synthetic oligonucleotide
  siRNAs to PCSK9
  modified_base (1)..(1): 2'-hydroxy corresponding base
  modified_base (2)..(2): 2'-hydroxy corresponding base
  modified_base (3)..(3): 2'-hydroxy corresponding base
  modified_base (4)..(4): 2'-hydroxy corresponding base
  modified_base (5)..(5): 2'-hydroxy corresponding base
  modified_base (6)..(6): 2'-hydroxy corresponding base
  modified_base (7)..(7): 2'-hydroxy corresponding base
  modified_base (8)..(8): 2'-hydroxy corresponding base
  modified_base (9)..(9): 2'-hydroxy corresponding base
  modified_base (10)..(10): 2'-hydroxy corresponding base
  modified_base (11)..(11): 2'-hydroxy corresponding base
  modified_base (12)..(12): 2'-hydroxy corresponding base
  modified_base (13)..(13): 2'-hydroxy corresponding base
  modified_base (14)..(14): 2'-hydroxy corresponding base
  modified_base (15)..(15): 2'-hydroxy corresponding base
  modified_base (16)..(16): 2'-hydroxy corresponding base
  modified_base (17)..(17): 2'-hydroxy corresponding base
  modified_base (18)..(18): 2'-hydroxy corresponding base
  modified_base (19)..(19): 2'-hydroxy corresponding base
  modified_base (20)..(20): deoxythymidine
  modified_base (21)..(21): deoxythymidine
gcagaguaaagguggcucatt

SEQ ID NO: 1001 - DNA, 21 bp, Artificial Sequence
  Description of Artificial Sequence: Synthetic oligonucleotide
  Description of Combined DNA/RNA Molecule: Synthetic oligonucleotide
  siRNAs to PCSK9
  modified_base (1)..(1): 2'-hydroxy corresponding base
  modified_base (2)..(2): 2'-hydroxy corresponding base
  modified_base (3)..(3): 2'-hydroxy corresponding base
  modified_base (4)..(4): 2'-hydroxy corresponding base
  modified_base (5)..(5): 2'-hydroxy corresponding base
  modified_base (6)..(6): 2'-hydroxy corresponding base
  modified_base (7)..(7): 2'-hydroxy corresponding base
  modified_base (8)..(8): 2'-hydroxy corresponding base
  modified_base (9)..(9): 2'-hydroxy corresponding base
  modified_base (10)..(10): 2'-hydroxy corresponding base
  modified_base (11)..(11): 2'-hydroxy corresponding base
  modified_base (12)..(12): 2'-hydroxy corresponding base
  modified_base (13)..(13): 2'-hydroxy corresponding base
  modified_base (14)..(14): 2'-hydroxy corresponding base
  modified_base (15)..(15): 2'-hydroxy corresponding base
  modified_base (16)..(16): 2'-hydroxy corresponding base
  modified_base (17)..(17): 2'-hydroxy corresponding base
  modified_base (18)..(18): 2'-hydroxy corresponding base
  modified_base (19)..(19): 2'-hydroxy corresponding base
  modified_base (20)..(20): deoxythymidine
  modified_base (21)..(21): deoxythymidine
agccaccuuuacucugcuctt

SEQ ID NO: 1002 - DNA, 21 bp, Artificial Sequence
  Description of Artificial Sequence: Synthetic oligonucleotide
  Description of Combined DNA/RNA Molecule: Synthetic oligonucleotide
  siRNAs to PCSK9
  modified_base (1)..(1): 2'-hydroxy corresponding base
  modified_base (2)..(2): 2'-hydroxy corresponding base
  modified_base (3)..(3): 2'-hydroxy corresponding base
  modified_base (4)..(4): 2'-hydroxy corresponding base
  modified_base (5)..(5): 2'-hydroxy corresponding base
  modified_base (6)..(6): 2'-hydroxy corresponding base
  modified_base (7)..(7): 2'-hydroxy corresponding base
  modified_base (8)..(8): 2'-hydroxy corresponding base
  modified_base (9)..(9): 2'-hydroxy corresponding base
  modified_base (10)..(10): 2'-hydroxy corresponding base
  modified_base (11)..(11): 2'-hydroxy corresponding base
  modified_base (12)..(12): 2'-hydroxy corresponding base
  modified_base (13)..(13): 2'-hydroxy corresponding base
  modified_base (14)..(14): 2'-hydroxy corresponding base
  modified_base (15)..(15): 2'-hydroxy corresponding base
  modified_base (16)..(16): 2'-hydroxy corresponding base
  modified_base (17)..(17): 2'-hydroxy corresponding base
  modified_base (18)..(18): 2'-hydroxy corresponding base
  modified_base (19)..(19): 2'-hydroxy corresponding base
  modified_base (20)..(20): deoxythymidine
  modified_base (21)..(21): deoxythymidine
gagcagaguaaagguggcutt

SEQ ID NO: 1003 - DNA, 21 bp, Artificial Sequence
  Description of Artificial Sequence: Synthetic oligonucleotide
  Description of Combined DNA/RNA Molecule: Synthetic oligonucleotide
  siRNAs to PCSK9
  modified_base (1)..(1): 2'-hydroxy corresponding base
  modified_base (2)..(2): 2'-hydroxy corresponding base
  modified_base (3)..(3): 2'-hydroxy corresponding base
  modified_base (4)..(4): 2'-hydroxy corresponding base
  modified_base (5)..(5): 2'-hydroxy corresponding base
  modified_base (6)..(6): 2'-hydroxy corresponding base
  modified_base (7)..(7): 2'-hydroxy corresponding base
  modified_base (8)..(8): 2'-hydroxy corresponding base
  modified_base (9)..(9): 2'-hydroxy corresponding base
  modified_base (10)..(10): 2'-hydroxy corresponding base
  modified_base (11)..(11): 2'-hydroxy corresponding base
  modified_base (12)..(12): 2'-hydroxy corresponding base
  modified_base (13)..(13): 2'-hydroxy corresponding base
  modified_base (14)..(14): 2'-hydroxy corresponding base
  modified_base (15)..(15): 2'-hydroxy corresponding base
  modified_base (16)..(16): 2'-hydroxy corresponding base
  modified_base (17)..(17): 2'-hydroxy corresponding base
  modified_base (18)..(18): 2'-hydroxy corresponding base
  modified_base (19)..(19): 2'-hydroxy corresponding base
  modified_base (20)..(20): deoxythymidine
  modified_base (21)..(21): deoxythymidine
caccuuuacucugcucuautt

SEQ ID NO: 1004 - DNA, 21 bp, Artificial Sequence
  Description of Artificial Sequence: Synthetic oligonucleotide
  Description of Combined DNA/RNA Molecule: Synthetic oligonucleotide
  siRNAs to PCSK9
  modified_base (1)..(1): 2'-hydroxy corresponding base
  modified_base (2)..(2): 2'-hydroxy corresponding base
  modified_base (3)..(3): 2'-hydroxy corresponding base
  modified_base (4)..(4): 2'-hydroxy corresponding base
  modified_base (5)..(5): 2'-hydroxy corresponding base
  modified_base (6)..(6): 2'-hydroxy corresponding base
  modified_base (7)..(7): 2'-hydroxy corresponding base
  modified_base (8)..(8): 2'-hydroxy corresponding base
  modified_base (9)..(9): 2'-hydroxy corresponding base
  modified_base (10)..(10): 2'-hydroxy corresponding base
  modified_base (11)..(11): 2'-hydroxy corresponding base
  modified_base (12)..(12): 2'-hydroxy corresponding base
  modified_base (13)..(13): 2'-hydroxy corresponding base
  modified_base (14)..(14): 2'-hydroxy corresponding base
  modified_base (15)..(15): 2'-hydroxy corresponding base
  modified_base (16)..(16): 2'-hydroxy corresponding base
  modified_base (17)..(17): 2'-hydroxy corresponding base
  modified_base (18)..(18): 2'-hydroxy corresponding base
  modified_base (19)..(19): 2'-hydroxy corresponding base
  modified_base (20)..(20): deoxythymidine
  modified_base (21)..(21): deoxythymidine
auagagcagaguaaaggugtt

SEQ ID NO: 1005 - DNA, 21 bp, Artificial Sequence
  Description of Artificial Sequence: Synthetic oligonucleotide
  Description of Combined DNA/RNA Molecule: Synthetic oligonucleotide
  siRNAs to PCSK9
  modified_base (1)..(1): 2'-hydroxy corresponding base
  modified_base (2)..(2): 2'-hydroxy corresponding base
  modified_base (3)..(3): 2'-hydroxy corresponding base
  modified_base (4)..(4): 2'-hydroxy corresponding base
  modified_base (5)..(5): 2'-hydroxy corresponding base
  modified_base (6)..(6): 2'-hydroxy corresponding base
  modified_base (7)..(7): 2'-hydroxy corresponding base
  modified_base (8)..(8): 2'-hydroxy corresponding base
  modified_base (9)..(9): 2'-hydroxy corresponding base
  modified_base (10)..(10): 2'-hydroxy corresponding base
  modified_base (11)..(11): 2'-hydroxy corresponding base
  modified_base (12)..(12): 2'-hydroxy corresponding base
  modified_base (13)..(13): 2'-hydroxy corresponding base
  modified_base (14)..(14): 2'-hydroxy corresponding base
  modified_base (15)..(15): 2'-hydroxy corresponding base
  modified_base (16)..(16): 2'-hydroxy corresponding base
  modified_base (17)..(17): 2'-hydroxy corresponding base
  modified_base (18)..(18): 2'-hydroxy corresponding base
  modified_base (19)..(19): 2'-hydroxy corresponding base
  modified_base (20)..(20): deoxythymidine
  modified_base (21)..(21): 5'-thio thymidine
uacucugcucuaugccaggtt

SEQ ID NO: 1006 - DNA, 21 bp, Artificial Sequence
  Description of Artificial Sequence: Synthetic oligonucleotide
  Description of Combined DNA/RNA Molecule: Synthetic oligonucleotide
  siRNAs to PCSK9
  modified_base (1)..(1): 2'-hydroxy corresponding base
  modified_base (2)..(2): 2'-hydroxy corresponding base
  modified_base (3)..(3): 2'-hydroxy corresponding base
  modified_base (4)..(4): 2'-hydroxy corresponding base
  modified_base (5)..(5): 2'-hydroxy corresponding base
  modified_base (6)..(6): 2'-hydroxy corresponding base
  modified_base (7)..(7): 2'-hydroxy corresponding base
  modified_base (8)..(8): 2'-hydroxy corresponding base
  modified_base (9)..(9): 2'-hydroxy corresponding base
  modified_base (10)..(10): 2'-hydroxy corresponding base
  modified_base (11)..(11): 2'-hydroxy corresponding base
  modified_base (12)..(12): 2'-hydroxy corresponding base
  modified_base (13)..(13): 2'-hydroxy corresponding base
  modified_base (14)..(14): 2'-hydroxy corresponding base
  modified_base (15)..(15): 2'-hydroxy corresponding base
  modified_base (16)..(16): 2'-hydroxy corresponding base
  modified_base (17)..(17): 2'-hydroxy corresponding base
  modified_base (18)..(18): 2'-hydroxy corresponding base
  modified_base (19)..(19): 2'-hydroxy corresponding base
  modified_base (20)..(20): deoxythymidine
  modified_base (21)..(21): 5'-thio thymidine
ccuggcauagagcagaguatt

SEQ ID NO: 1007 - DNA, 21 bp, Artificial Sequence
  Description of Artificial Sequence: Synthetic oligonucleotide
  Description of Combined DNA/RNA Molecule: Synthetic oligonucleotide
  siRNAs to PCSK9
  modified_base (1)..(1): 2'-O-methyl corresponding base
  modified_base (2)..(2): 2'-hydroxy corresponding base
  modified_base (3)..(3): 2'-O-methyl corresponding base
  modified_base (4)..(4): 2'-O-methyl corresponding base
  modified_base (5)..(5): 2'-O-methyl corresponding base
  modified_base (6)..(6): 2'-O-methyl corresponding base
  modified_base (7)..(7): 2'-hydroxy corresponding base
  modified_base (8)..(8): 2'-O-methyl corresponding base
  modified_base (9)..(9): 2'-O-methyl corresponding base
  modified_base (10)..(10): 2'-O-methyl corresponding base
  modified_base (11)..(11): 2'-O-methyl corresponding base
  modified_base (12)..(12): 2'-hydroxy corresponding base
  modified_base (13)..(13): 2'-O-methyl corresponding base
  modified_base (14)..(14): 2'-hydroxy corresponding base
  modified_base (15)..(15): 2'-O-methyl corresponding base
  modified_base (16)..(16): 2'-O-methyl corresponding base
  modified_base (17)..(17): 2'-hydroxy corresponding base
  modified_base (18)..(18): 2'-hydroxy corresponding base
  modified_base (19)..(19): 2'-hydroxy corresponding base
  modified_base (20)..(20): deoxythymidine
  modified_base (21)..(21): 5'-thio thymidine
uacucugcucuaugccaggtt

SEQ ID NO: 1008 - DNA, 21 bp, Artificial Sequence
  Description of Artificial Sequence: Synthetic oligonucleotide
  Description of Combined DNA/RNA Molecule: Synthetic oligonucleotide
  siRNAs to PCSK9
  modified_base (1)..(1): 2'-hydroxy corresponding base
  modified_base (2)..(2): 2'-hydroxy corresponding base
  modified_base (3)..(3): 2'-hydroxy corresponding base
  modified_base (4)..(4): 2'-hydroxy corresponding base
  modified_base (5)..(5): 2'-hydroxy corresponding base
  modified_base (6)..(6): 2'-O-methyl corresponding base
  modified_base (7)..(7): 2'-hydroxy corresponding base
  modified_base (8)..(8): 2'-O-methyl corresponding base
  modified_base (9)..(9): 2'-hydroxy corresponding base
  modified_base (10)..(10): 2'-hydroxy corresponding base
  modified_base (11)..(11): 2'-hydroxy corresponding base
  modified_base (12)..(12): 2'-hydroxy corresponding base
  modified_base (13)..(13): 2'-O-methyl corresponding base
  modified_base (14)..(14): 2'-hydroxy corresponding base
  modified_base (15)..(15): 2'-hydroxy corresponding base
  modified_base (16)..(16): 2'-hydroxy corresponding base
  modified_base (17)..(17): 2'-hydroxy corresponding base
  modified_base (18)..(18): 2'-O-methyl corresponding base
  modified_base (19)..(19): 2'-hydroxy corresponding base
  modified_base (20)..(20): deoxythymidine
  modified_base (21)..(21): 5'-thio thymidine
ccuggcauagagcagaguatt

SEQ ID NO: 1009 - DNA, 21 bp, Artificial Sequence
  Description of Artificial Sequence: Synthetic oligonucleotide
  Description of Combined DNA/RNA Molecule: Synthetic oligonucleotide
  siRNAs to PCSK9
  modified_base (1)..(1): 2'-hydroxy corresponding base
  modified_base (2)..(2): 2'-hydroxy corresponding base
  modified_base (3)..(3): 2'-hydroxy corresponding base
  modified_base (4)..(4): 2'-hydroxy corresponding base
  modified_base (5)..(5): 2'-hydroxy corresponding base
  modified_base (6)..(6): 2'-hydroxy corresponding base
  modified_base (7)..(7): 2'-hydroxy corresponding base
  modified_base (8)..(8): 2'-hydroxy corresponding base
  modified_base (9)..(9): 2'-hydroxy corresponding base
  modified_base (10)..(10): 2'-hydroxy corresponding base
  modified_base (11)..(11): 2'-hydroxy corresponding base
  modified_base (12)..(12): 2'-hydroxy corresponding base
  modified_base (13)..(13): 2'-hydroxy corresponding base
  modified_base (14)..(14): 2'-hydroxy corresponding base
  modified_base (15)..(15): 2'-hydroxy corresponding base
  modified_base (16)..(16): 2'-hydroxy corresponding base
  modified_base (17)..(17): 2'-hydroxy corresponding base
  modified_base (18)..(18): 2'-hydroxy corresponding base
  modified_base (19)..(19): 2'-hydroxy corresponding base
  modified_base (20)..(20): deoxythymidine
  modified_base (21)..(21): deoxythymidine
augccaggcugugcuagcatt

SEQ ID NO: 1010 - DNA, 21 bp, Artificial Sequence
  Description of Artificial Sequence: Synthetic oligonucleotide
  Description of Combined DNA/RNA Molecule: Synthetic oligonucleotide
  siRNAs to PCSK9
  modified_base (1)..(1): 2'-hydroxy corresponding base
  modified_base (2)..(2): 2'-hydroxy corresponding base
  modified_base (3)..(3): 2'-hydroxy corresponding base
  modified_base (4)..(4): 2'-hydroxy corresponding base
  modified_base (5)..(5): 2'-hydroxy corresponding base
  modified_base (6)..(6): 2'-hydroxy corresponding base
  modified_base (7)..(7): 2'-hydroxy corresponding base
  modified_base (8)..(8): 2'-hydroxy corresponding base
  modified_base (9)..(9): 2'-hydroxy corresponding base
  modified_base (10)..(10): 2'-hydroxy corresponding base
  modified_base (11)..(11): 2'-hydroxy corresponding base
  modified_base (12)..(12): 2'-hydroxy corresponding base
  modified_base (13)..(13): 2'-hydroxy corresponding base
  modified_base (14)..(14): 2'-hydroxy corresponding base
  modified_base (15)..(15): 2'-hydroxy corresponding base
  modified_base (16)..(16): 2'-hydroxy corresponding base
  modified_base (17)..(17): 2'-hydroxy corresponding base
  modified_base (18)..(18): 2'-hydroxy corresponding base
  modified_base (19)..(19): 2'-hydroxy corresponding base
  modified_base (20)..(20): deoxythymidine
  modified_base (21)..(21): deoxythymidine
ugcuagcacagccuggcautt

SEQ ID NO: 1011 - DNA, 21 bp, Artificial Sequence
  Description of Artificial Sequence: Synthetic oligonucleotide
  Description of Combined DNA/RNA Molecule: Synthetic oligonucleotide
  siRNAs to PCSK9
  modified_base (1)..(1): 2'-hydroxy corresponding base
  modified_base (2)..(2): 2'-hydroxy corresponding base
  modified_base (3)..(3): 2'-hydroxy corresponding base
  modified_base (4)..(4): 2'-hydroxy corresponding base
  modified_base (5)..(5): 2'-hydroxy corresponding base
  modified_base (6)..(6): 2'-hydroxy corresponding base
  modified_base (7)..(7): 2'-hydroxy corresponding base
  modified_base (8)..(8): 2'-hydroxy corresponding base
  modified_base (9)..(9): 2'-hydroxy corresponding base
  modified_base (10)..(10): 2'-hydroxy corresponding base
  modified_base (11)..(11): 2'-hydroxy corresponding base
  modified_base (12)..(12): 2'-hydroxy corresponding base
  modified_base (13)..(13): 2'-hydroxy corresponding base
  modified_base (14)..(14): 2'-hydroxy corresponding base
  modified_base (15)..(15): 2'-hydroxy corresponding base
  modified_base (16)..(16): 2'-hydroxy corresponding base
  modified_base (17)..(17): 2'-hydroxy corresponding base
  modified_base (18)..(18): 2'-hydroxy corresponding base
  modified_base (19)..(19): 2'-hydroxy corresponding base
  modified_base (20)..(20): deoxythymidine
  modified_base (21)..(21): deoxythymidine
aggcugugcuagcaacacctt

SEQ ID NO: 1012 - DNA, 21 bp, Artificial Sequence
  Description of Artificial Sequence: Synthetic oligonucleotide
  Description of Combined DNA/RNA Molecule: Synthetic oligonucleotide
  siRNAs to PCSK9
  modified_base (1)..(1): 2'-hydroxy corresponding base
  modified_base (2)..(2): 2'-hydroxy corresponding base
  modified_base (3)..(3): 2'-hydroxy corresponding base
  modified_base (4)..(4): 2'-hydroxy corresponding base
  modified_base (5)..(5): 2'-hydroxy corresponding base
  modified_base (6)..(6): 2'-hydroxy corresponding base
  modified_base (7)..(7): 2'-hydroxy corresponding base
  modified_base (8)..(8): 2'-hydroxy corresponding base
  modified_base (9)..(9): 2'-hydroxy corresponding base
  modified_base (10)..(10): 2'-hydroxy corresponding base
  modified_base (11)..(11): 2'-hydroxy corresponding base
  modified_base (12)..(12): 2'-hydroxy corresponding base
  modified_base (13)..(13): 2'-hydroxy corresponding base
  modified_base (14)..(14): 2'-hydroxy corresponding base
  modified_base (15)..(15): 2'-hydroxy corresponding base
  modified_base (16)..(16): 2'-hydroxy corresponding base
  modified_base (17)..(17): 2'-hydroxy corresponding base
  modified_base (18)..(18): 2'-hydroxy corresponding base
  modified_base (19)..(19): 2'-hydroxy corresponding base
  modified_base (20)..(20): deoxythymidine
  modified_base (21)..(21): deoxythymidine
gguguugcuagcacagccutt

SEQ ID NO: 1013 - DNA, 21 bp, Artificial Sequence
  Description of Artificial Sequence: Synthetic oligonucleotide
  Description of Combined DNA/RNA Molecule: Synthetic oligonucleotide
  siRNAs to PCSK9
  modified_base (1)..(1): 2'-hydroxy corresponding base
  modified_base (2)..(2): 2'-hydroxy corresponding base
  modified_base (3)..(3): 2'-hydroxy corresponding base
  modified_base (4)..(4): 2'-hydroxy corresponding base
  modified_base (5)..(5): 2'-hydroxy corresponding base
  modified_base (6)..(6): 2'-hydroxy corresponding base
  modified_base (7)..(7): 2'-hydroxy corresponding base
  modified_base (8)..(8): 2'-hydroxy corresponding base
  modified_base (9)..(9): 2'-hydroxy corresponding base
  modified_base (10)..(10): 2'-hydroxy corresponding base
  modified_base (11)..(11): 2'-hydroxy corresponding base
  modified_base (12)..(12): 2'-hydroxy corresponding base
  modified_base (13)..(13): 2'-hydroxy corresponding base
  modified_base (14)..(14): 2'-hydroxy corresponding base
  modified_base (15)..(15): 2'-hydroxy corresponding base
  modified_base (16)..(16): 2'-hydroxy corresponding base
  modified_base (17)..(17): 2'-hydroxy corresponding base
  modified_base (18)..(18): 2'-hydroxy corresponding base
  modified_base (19)..(19): 2'-hydroxy corresponding base
  modified_base (20)..(20): deoxythymidine
  modified_base (21)..(21): deoxythymidine
cugugcuagcaacacccaatt

SEQ ID NO: 1014 - DNA, 21 bp, Artificial Sequence
  Description of Artificial Sequence: Synthetic oligonucleotide
  Description of Combined DNA/RNA Molecule: Synthetic oligonucleotide
  siRNAs to PCSK9
  modified_base (1)..(1): 2'-hydroxy corresponding base
  modified_base (2)..(2): 2'-hydroxy corresponding base
  modified_base (3)..(3): 2'-hydroxy corresponding base
  modified_base (4)..(4): 2'-hydroxy corresponding base
  modified_base (5)..(5): 2'-hydroxy corresponding base
  modified_base (6)..(6): 2'-hydroxy corresponding base
  modified_base (7)..(7): 2'-hydroxy corresponding base
  modified_base (8)..(8): 2'-hydroxy corresponding base
  modified_base (9)..(9): 2'-hydroxy corresponding base
  modified_base (10)..(10): 2'-hydroxy corresponding base
  modified_base (11)..(11): 2'-hydroxy corresponding base
  modified_base (12)..(12): 2'-hydroxy corresponding base
  modified_base (13)..(13): 2'-hydroxy corresponding base
  modified_base (14)..(14): 2'-hydroxy corresponding base
  modified_base (15)..(15): 2'-hydroxy corresponding base
  modified_base (16)..(16): 2'-hydroxy corresponding base
  modified_base (17)..(17): 2'-hydroxy corresponding base
  modified_base (18)..(18): 2'-hydroxy corresponding base
  modified_base (19)..(19): 2'-hydroxy corresponding base
  modified_base (20)..(20): deoxythymidine
  modified_base (21)..(21): deoxythymidine
uuggguguugcuagcacagtt

SEQ ID NO: 1015 - DNA, 21 bp, Artificial Sequence
  Description of Artificial Sequence: Synthetic oligonucleotide
  Description of Combined DNA/RNA Molecule: Synthetic oligonucleotide
  siRNAs to PCSK9
  modified_base (1)..(1): 2'-hydroxy corresponding base
  modified_base (2)..(2): 2'-hydroxy corresponding base
  modified_base (3)..(3): 2'-hydroxy corresponding base
  modified_base (4)..(4): 2'-hydroxy corresponding base
  modified_base (5)..(5): 2'-hydroxy corresponding base
  modified_base (6)..(6): 2'-hydroxy corresponding base
  modified_base (7)..(7): 2'-hydroxy corresponding base
  modified_base (8)..(8): 2'-hydroxy corresponding base
  modified_base (9)..(9): 2'-hydroxy corresponding base
  modified_base (10)..(10): 2'-hydroxy corresponding base
  modified_base (11)..(11): 2'-hydroxy corresponding base
  modified_base (12)..(12): 2'-hydroxy corresponding base
  modified_base (13)..(13): 2'-hydroxy corresponding base
  modified_base (14)..(14): 2'-hydroxy corresponding base
  modified_base (15)..(15): 2'-hydroxy corresponding base
  modified_base (16)..(16): 2'-hydroxy corresponding base
  modified_base (17)..(17): 2'-hydroxy corresponding base
  modified_base (18)..(18): 2'-hydroxy corresponding base
  modified_base (19)..(19): 2'-hydroxy corresponding base
  modified_base (20)..(20): deoxythymidine
  modified_base (21)..(21): deoxythymidine
gcuagcaacacccaaaggutt

SEQ ID NO: 1016 - DNA, 21 bp, Artificial Sequence
  Description of Artificial Sequence: Synthetic oligonucleotide
  Description of Combined DNA/RNA Molecule: Synthetic oligonucleotide
  siRNAs to PCSK9
  modified_base (1)..(1): 2'-hydroxy corresponding base
  modified_base (2)..(2): 2'-hydroxy corresponding base
  modified_base (3)..(3): 2'-hydroxy corresponding base
  modified_base (4)..(4): 2'-hydroxy corresponding base
  modified_base (5)..(5): 2'-hydroxy corresponding base
  modified_base (6)..(6): 2'-hydroxy corresponding base
  modified_base (7)..(7): 2'-hydroxy corresponding base
  modified_base (8)..(8): 2'-hydroxy corresponding base
  modified_base (9)..(9): 2'-hydroxy corresponding base
  modified_base (10)..(10): 2'-hydroxy corresponding base
  modified_base (11)..(11): 2'-hydroxy corresponding base
  modified_base (12)..(12): 2'-hydroxy corresponding base
  modified_base (13)..(13): 2'-hydroxy corresponding base
  modified_base (14)..(14): 2'-hydroxy corresponding base
  modified_base (15)..(15): 2'-hydroxy corresponding base
  modified_base (16)..(16): 2'-hydroxy corresponding base
  modified_base (17)..(17): 2'-hydroxy corresponding base
  modified_base (18)..(18): 2'-hydroxy corresponding base
  modified_base (19)..(19): 2'-hydroxy corresponding base
  modified_base (20)..(20): deoxythymidine
  modified_base (21)..(21): deoxythymidine
accuuuggguguugcuagctt

SEQ ID NO: 1017 - DNA, 21 bp, Artificial Sequence
  Description of Artificial Sequence: Synthetic oligonucleotide
  Description of Combined DNA/RNA Molecule: Synthetic oligonucleotide
  siRNAs to PCSK9
  modified_base (1)..(1): 2'-hydroxy corresponding base
  modified_base (2)..(2): 2'-hydroxy corresponding base
  modified_base (3)..(3): 2'-hydroxy corresponding base
  modified_base (4)..(4): 2'-hydroxy corresponding base
  modified_base (5)..(5): 2'-hydroxy corresponding base
  modified_base (6)..(6): 2'-hydroxy corresponding base
  modified_base (7)..(7): 2'-hydroxy corresponding base
  modified_base (8)..(8): 2'-hydroxy corresponding base
  modified_base (9)..(9): 2'-hydroxy corresponding base
  modified_base (10)..(10): 2'-hydroxy corresponding base
  modified_base (11)..(11): 2'-hydroxy corresponding base
  modified_base (12)..(12): 2'-hydroxy corresponding base
  modified_base (13)..(13): 2'-hydroxy corresponding base
  modified_base (14)..(14): 2'-hydroxy corresponding base
  modified_base (15)..(15): 2'-hydroxy corresponding base
  modified_base (16)..(16): 2'-hydroxy corresponding base
  modified_base (17)..(17): 2'-hydroxy corresponding base
  modified_base (18)..(18): 2'-hydroxy corresponding base
  modified_base (19)..(19): 2'-hydroxy corresponding base
  modified_base (20)..(20): deoxythymidine
  modified_base (21)..(21): deoxythymidine
ggagccaucaccuaggacutt

SEQ ID NO: 1018 - DNA, 21 bp, Artificial Sequence
  Description of Artificial Sequence: Synthetic oligonucleotide
  Description of Combined DNA/RNA Molecule: Synthetic oligonucleotide
  siRNAs to PCSK9
  modified_base (1)..(1): 2'-hydroxy corresponding base
  modified_base (2)..(2): 2'-hydroxy corresponding base
  modified_base (3)..(3): 2'-hydroxy corresponding base
  modified_base (4)..(4): 2'-hydroxy corresponding base
  modified_base (5)..(5): 2'-hydroxy corresponding base
  modified_base (6)..(6): 2'-hydroxy corresponding base
  modified_base (7)..(7): 2'-hydroxy corresponding base
  modified_base (8)..(8): 2'-hydroxy corresponding base
  modified_base (9)..(9): 2'-hydroxy corresponding base
  modified_base (10)..(10): 2'-hydroxy corresponding base
  modified_base (11)..(11): 2'-hydroxy corresponding base
  modified_base (12)..(12): 2'-hydroxy corresponding base
  modified_base (13)..(13): 2'-hydroxy corresponding base
  modified_base (14)..(14): 2'-hydroxy corresponding base
  modified_base (15)..(15): 2'-hydroxy corresponding base
  modified_base (16)..(16): 2'-hydroxy corresponding base
  modified_base (17)..(17): 2'-hydroxy corresponding base
  modified_base (18)..(18): 2'-hydroxy corresponding base
  modified_base (19)..(19): 2'-hydroxy corresponding base
  modified_base (20)..(20): deoxythymidine
  modified_base (21)..(21): deoxythymidine
aguccuaggugauggcucctt

SEQ ID NO: 1019 - DNA, 21 bp, Artificial Sequence
  Description of Artificial Sequence: Synthetic oligonucleotide
  Description of Combined DNA/RNA Molecule: Synthetic oligonucleotide
  siRNAs to PCSK9
  modified_base (1)..(1): 2'-hydroxy corresponding base
  modified_base (2)..(2): 2'-hydroxy corresponding base
  modified_base (3)..(3): 2'-hydroxy corresponding base
  modified_base (4)..(4): 2'-hydroxy corresponding base
  modified_base (5)..(5): 2'-hydroxy corresponding base
  modified_base (6)..(6): 2'-hydroxy corresponding base
  modified_base (7)..(7): 2'-hydroxy corresponding base
  modified_base (8)..(8): 2'-hydroxy corresponding base
  modified_base (9)..(9): 2'-hydroxy corresponding base
  modified_base (10)..(10): 2'-hydroxy corresponding base
  modified_base (11)..(11): 2'-hydroxy corresponding base
  modified_base (12)..(12): 2'-hydroxy corresponding base
  modified_base (13)..(13): 2'-hydroxy corresponding base
  modified_base (14)..(14): 2'-hydroxy corresponding base
  modified_base (15)..(15): 2'-hydroxy corresponding base
  modified_base (16)..(16): 2'-hydroxy corresponding base
  modified_base (17)..(17): 2'-hydroxy corresponding base
  modified_base (18)..(18): 2'-hydroxy corresponding base
  modified_base (19)..(19): 2'-hydroxy corresponding base
  modified_base (20)..(20): deoxythymidine
  modified_base (21)..(21): deoxythymidine
caccuaggacugacucggctt

SEQ ID NO: 1020 - DNA, 21 bp, Artificial Sequence
  Description of Artificial Sequence: Synthetic oligonucleotide
  Description of Combined DNA/RNA Molecule: Synthetic oligonucleotide
  siRNAs to PCSK9
  modified_base (1)..(1): 2'-hydroxy corresponding base
  modified_base (2)..(2): 2'-hydroxy corresponding base
  modified_base (3)..(3): 2'-hydroxy corresponding base
  modified_base (4)..(4): 2'-hydroxy corresponding base
  modified_base (5)..(5): 2'-hydroxy corresponding base
  modified_base (6)..(6): 2'-hydroxy corresponding base
  modified_base (7)..(7): 2'-hydroxy corresponding base
  modified_base (8)..(8): 2'-hydroxy corresponding base
  modified_base (9)..(9): 2'-hydroxy corresponding base
  modified_base (10)..(10): 2'-hydroxy corresponding base
  modified_base (11)..(11): 2'-hydroxy corresponding base
  modified_base (12)..(12): 2'-hydroxy corresponding base
  modified_base (13)..(13): 2'-hydroxy corresponding base
  modified_base (14)..(14): 2'-hydroxy corresponding base
  modified_base (15)..(15): 2'-hydroxy corresponding base
  modified_base (16)..(16): 2'-hydroxy corresponding base
  modified_base (17)..(17): 2'-hydroxy corresponding base
  modified_base (18)..(18): 2'-hydroxy corresponding base
  modified_base (19)..(19): 2'-hydroxy corresponding base
  modified_base (20)..(20): deoxythymidine
  modified_base (21)..(21): deoxythymidine
gccgagucaguccuaggugtt

SEQ ID NO: 1021 - DNA, 21 bp, Artificial Sequence
  Description of Artificial Sequence: Synthetic oligonucleotide
  Description of Combined DNA/RNA Molecule: Synthetic oligonucleotide
  siRNAs to PCSK9
  modified_base (1)..(1): 2'-hydroxy corresponding base
  modified_base (2)..(2): 2'-hydroxy corresponding base
  modified_base (3)..(3): 2'-hydroxy corresponding base
  modified_base (4)..(4): 2'-hydroxy corresponding base
  modified_base (5)..(5): 2'-hydroxy corresponding base
  modified_base (6)..(6): 2'-hydroxy corresponding base
  modified_base (7)..(7): 2'-hydroxy corresponding base
  modified_base (8)..(8): 2'-hydroxy corresponding base
  modified_base (9)..(9): 2'-hydroxy corresponding base
  modified_base (10)..(10): 2'-hydroxy corresponding base
  modified_base (11)..(11): 2'-hydroxy corresponding base
  modified_base (12)..(12): 2'-hydroxy corresponding base
  modified_base (13)..(13): 2'-hydroxy corresponding base
  modified_base (14)..(14): 2'-hydroxy corresponding base
  modified_base (15)..(15): 2'-hydroxy corresponding base
  modified_base (16)..(16): 2'-hydroxy corresponding base
  modified_base (17)..(17): 2'-hydroxy corresponding base
  modified_base (18)..(18): 2'-hydroxy corresponding base
  modified_base (19)..(19): 2'-hydroxy corresponding base
  modified_base (20)..(20): deoxythymidine
  modified_base (21)..(21): deoxythymidine
aggacugacucggcagugutt

SEQ ID NO: 1022 - DNA, 21 bp, Artificial Sequence
  Description of Artificial Sequence: Synthetic oligonucleotide
  Description of Combined DNA/RNA Molecule: Synthetic oligonucleotide
  siRNAs to PCSK9
  modified_base (1)..(1): 2'-hydroxy corresponding base
  modified_base (2)..(2): 2'-hydroxy corresponding base
  modified_base (3)..(3): 2'-hydroxy corresponding base
  modified_base (4)..(4): 2'-hydroxy corresponding base
  modified_base (5)..(5): 2'-hydroxy corresponding base
  modified_base (6)..(6): 2'-hydroxy corresponding base
  modified_base (7)..(7): 2'-hydroxy corresponding base
  modified_base (8)..(8): 2'-hydroxy corresponding base
  modified_base (9)..(9): 2'-hydroxy corresponding base
  modified_base (10)..(10): 2'-hydroxy corresponding base
  modified_base (11)..(11): 2'-hydroxy corresponding base
  modified_base (12)..(12): 2'-hydroxy corresponding base
  modified_base (13)..(13): 2'-hydroxy corresponding base
  modified_base (14)..(14): 2'-hydroxy corresponding base
  modified_base (15)..(15): 2'-hydroxy corresponding base
  modified_base (16)..(16): 2'-hydroxy corresponding base
  modified_base (17)..(17): 2'-hydroxy corresponding base
  modified_base (18)..(18): 2'-hydroxy corresponding base
  modified_base (19)..(19): 2'-hydroxy corresponding base
  modified_base (20)..(20): deoxythymidine
  modified_base (21)..(21): deoxythymidine
acacugccgagucaguccutt

SEQ ID NO: 1023 - DNA, 21 bp, Artificial Sequence
  Description of Artificial Sequence: Synthetic oligonucleotide
  Description of Combined DNA/RNA Molecule: Synthetic oligonucleotide
  siRNAs to PCSK9
  modified_base (1)..(1): 2'-hydroxy corresponding base
  modified_base (2)..(2): 2'-hydroxy corresponding base
  modified_base (3)..(3): 2'-hydroxy corresponding base
  modified_base (4)..(4): 2'-hydroxy corresponding base
  modified_base (5)..(5): 2'-hydroxy corresponding base
  modified_base (6)..(6): 2'-hydroxy corresponding base
  modified_base (7)..(7): 2'-hydroxy corresponding base
  modified_base (8)..(8): 2'-hydroxy corresponding base
  modified_base (9)..(9): 2'-hydroxy corresponding base
  modified_base (10)..(10): 2'-hydroxy corresponding base
  modified_base (11)..(11): 2'-hydroxy corresponding base
  modified_base (12)..(12): 2'-hydroxy corresponding base
  modified_base (13)..(13): 2'-hydroxy corresponding base
  modified_base (14)..(14): 2'-hydroxy corresponding base
  modified_base (15)..(15): 2'-hydroxy corresponding base
  modified_base (16)..(16): 2'-hydroxy corresponding base
  modified_base (17)..(17): 2'-hydroxy corresponding base
  modified_base (18)..(18): 2'-hydroxy corresponding base
  modified_base (19)..(19): 2'-hydroxy corresponding base
  modified_base (20)..(20): deoxythymidine
  modified_base (21)..(21): deoxythymidine
ggacugacucggcagugugtt

SEQ ID NO: 1024 - DNA, 21 bp, Artificial Sequence
  Description of Artificial Sequence: Synthetic oligonucleotide
  Description of Combined DNA/RNA Molecule: Synthetic oligonucleotide
  siRNAs to PCSK9
  modified_base (1)..(1): 2'-hydroxy corresponding base
  modified_base (2)..(2): 2'-hydroxy corresponding base
  modified_base (3)..(3): 2'-hydroxy corresponding base
  modified_base (4)..(4): 2'-hydroxy corresponding base
  modified_base (5)..(5): 2'-hydroxy corresponding base
  modified_base (6)..(6): 2'-hydroxy corresponding base
  modified_base (7)..(7): 2'-hydroxy corresponding base
  modified_base (8)..(8): 2'-hydroxy corresponding base
  modified_base (9)..(9): 2'-hydroxy corresponding base
  modified_base (10)..(10): 2'-hydroxy corresponding base
  modified_base (11)..(11): 2'-hydroxy corresponding base
  modified_base (12)..(12): 2'-hydroxy corresponding base
  modified_base (13)..(13): 2'-hydroxy corresponding base
  modified_base (14)..(14): 2'-hydroxy corresponding base
  modified_base (15)..(15): 2'-hydroxy corresponding base
  modified_base (16)..(16): 2'-hydroxy corresponding base
  modified_base (17)..(17): 2'-hydroxy corresponding base
  modified_base (18)..(18): 2'-hydroxy corresponding base
  modified_base (19)..(19): 2'-hydroxy corresponding base
  modified_base (20)..(20): deoxythymidine
  modified_base (21)..(21): deoxythymidine
cacacugccgagucagucctt

SEQ ID NO: 1025 - DNA, 21 bp, Artificial Sequence
  Description of Artificial Sequence: Synthetic oligonucleotide
  Description of Combined DNA/RNA Molecule: Synthetic oligonucleotide
  siRNAs to PCSK9
  modified_base (1)..(1): 2'-hydroxy corresponding base
  modified_base (2)..(2): 2'-hydroxy corresponding base
  modified_base (3)..(3): 2'-hydroxy corresponding base
  modified_base (4)..(4): 2'-hydroxy corresponding base
  modified_base (5)..(5): 2'-hydroxy corresponding base
  modified_base (6)..(6): 2'-hydroxy corresponding base
  modified_base (7)..(7): 2'-hydroxy corresponding base
  modified_base (8)..(8): 2'-hydroxy corresponding base
  modified_base (9)..(9): 2'-hydroxy corresponding base
  modified_base (10)..(10): 2'-hydroxy corresponding base
  modified_base (11)..(11): 2'-hydroxy corresponding base
  modified_base (12)..(12): 2'-hydroxy corresponding base
  modified_base (13)..(13): 2'-hydroxy corresponding base
  modified_base (14)..(14): 2'-hydroxy corresponding base
  modified_base (15)..(15): 2'-hydroxy corresponding base
  modified_base (16)..(16): 2'-hydroxy corresponding base
  modified_base (17)..(17): 2'-hydroxy corresponding base
  modified_base (18)..(18): 2'-hydroxy corresponding base
  modified_base (19)..(19): 2'-hydroxy corresponding base
  modified_base (20)..(20): deoxythymidine
  modified_base (21)..(21): deoxythymidine
uggugcaugcacugucucatt

SEQ ID NO: 1026 - DNA, 21 bp, Artificial Sequence
  Description of Artificial Sequence: Synthetic oligonucleotide
  Description of Combined DNA/RNA Molecule: Synthetic oligonucleotide
  siRNAs to PCSK9
  modified_base (1)..(1): 2'-hydroxy corresponding base
  modified_base (2)..(2): 2'-hydroxy corresponding base
  modified_base (3)..(3): 2'-hydroxy corresponding base
  modified_base (4)..(4): 2'-hydroxy corresponding base
  modified_base (5)..(5): 2'-hydroxy corresponding base
  modified_base (6)..(6): 2'-hydroxy corresponding base
  modified_base (7)..(7): 2'-hydroxy corresponding base
  modified_base (8)..(8): 2'-hydroxy corresponding base
  modified_base (9)..(9): 2'-hydroxy corresponding base
  modified_base (10)..(10): 2'-hydroxy corresponding base
  modified_base (11)..(11): 2'-hydroxy corresponding base
  modified_base (12)..(12): 2'-hydroxy corresponding base
  modified_base (13)..(13): 2'-hydroxy corresponding base
  modified_base (14)..(14): 2'-hydroxy corresponding base
  modified_base (15)..(15): 2'-hydroxy corresponding base
  modified_base (16)..(16): 2'-hydroxy corresponding base
  modified_base (17)..(17): 2'-hydroxy corresponding base
  modified_base (18)..(18): 2'-hydroxy corresponding base
  modified_base (19)..(19): 2'-hydroxy corresponding base
  modified_base (20)..(20): deoxythymidine
  modified_base (21)..(21): deoxythymidine
ugagacagugcaugcaccatt

SEQ ID NO: 1027 - DNA, 21 bp, Artificial Sequence
  Description of Artificial Sequence: Synthetic oligonucleotide
  Description of Combined DNA/RNA Molecule: Synthetic oligonucleotide
  siRNAs to PCSK9
  modified_base (1)..(1): 2'-hydroxy corresponding base
  modified_base (2)..(2): 2'-hydroxy corresponding base
  modified_base (3)..(3): 2'-hydroxy corresponding base
  modified_base (4)..(4): 2'-hydroxy corresponding base
  modified_base (5)..(5): 2'-hydroxy corresponding base
  modified_base (6)..(6): 2'-hydroxy corresponding base
  modified_base (7)..(7): 2'-hydroxy corresponding base
  modified_base (8)..(8): 2'-hydroxy corresponding base
  modified_base (9)..(9): 2'-hydroxy corresponding base
  modified_base (10)..(10): 2'-hydroxy corresponding base
  modified_base (11)..(11): 2'-hydroxy corresponding base
  modified_base (12)..(12): 2'-hydroxy corresponding base
  modified_base (13)..(13): 2'-hydroxy corresponding base
  modified_base (14)..(14): 2'-hydroxy corresponding base
  modified_base (15)..(15): 2'-hydroxy corresponding base
  modified_base (16)..(16): 2'-hydroxy corresponding base
  modified_base (17)..(17): 2'-hydroxy corresponding base
  modified_base (18)..(18): 2'-hydroxy corresponding base
  modified_base (19)..(19): 2'-hydroxy corresponding base
  modified_base (20)..(20): deoxythymidine
  modified_base (21)..(21): deoxythymidine
augcacugucucagccaactt

SEQ ID NO: 1028 - DNA, 21 bp, Artificial Sequence
  Description of Artificial Sequence: Synthetic oligonucleotide
  Description of Combined DNA/RNA Molecule: Synthetic oligonucleotide
  siRNAs to PCSK9
  modified_base (1)..(1): 2'-hydroxy corresponding base
  modified_base (2)..(2): 2'-hydroxy corresponding base
  modified_base (3)..(3): 2'-hydroxy corresponding base
  modified_base (4)..(4): 2'-hydroxy corresponding base
  modified_base (5)..(5): 2'-hydroxy corresponding base
  modified_base (6)..(6): 2'-hydroxy corresponding base
  modified_base (7)..(7): 2'-hydroxy corresponding base
  modified_base (8)..(8): 2'-hydroxy corresponding base
  modified_base (9)..(9): 2'-hydroxy corresponding base
  modified_base (10)..(10): 2'-hydroxy corresponding base
  modified_base (11)..(11): 2'-hydroxy corresponding base
  modified_base (12)..(12): 2'-hydroxy corresponding base
  modified_base (13)..(13): 2'-hydroxy corresponding base
  modified_base (14)..(14): 2'-hydroxy corresponding base
  modified_base (15)..(15): 2'-hydroxy corresponding base
  modified_base (16)..(16): 2'-hydroxy corresponding base
  modified_base (17)..(17): 2'-hydroxy corresponding base
  modified_base (18)..(18): 2'-hydroxy corresponding base
  modified_base (19)..(19): 2'-hydroxy corresponding base
  modified_base (20)..(20): deoxythymidine
  modified_base (21)..(21): deoxythymidine
guuggcugagacagugcautt

SEQ ID NO: 1029 - DNA, 21 bp, Artificial Sequence
  Description of Artificial Sequence: Synthetic oligonucleotide
  Description of Combined DNA/RNA Molecule: Synthetic oligonucleotide
  siRNAs to PCSK9
  modified_base (1)..(1): 2'-hydroxy corresponding base
  modified_base (2)..(2): 2'-hydroxy corresponding base
  modified_base (3)..(3): 2'-hydroxy corresponding base
  modified_base (4)..(4): 2'-hydroxy corresponding base
  modified_base (5)..(5): 2'-hydroxy corresponding base
  modified_base (6)..(6): 2'-hydroxy corresponding base
  modified_base (7)..(7): 2'-hydroxy corresponding base
  modified_base (8)..(8): 2'-hydroxy corresponding base
  modified_base (9)..(9): 2'-hydroxy corresponding base
  modified_base (10)..(10): 2'-hydroxy corresponding base
  modified_base (11)..(11): 2'-hydroxy corresponding base
  modified_base (12)..(12): 2'-hydroxy corresponding base
  modified_base (13)..(13): 2'-hydroxy corresponding base
  modified_base (14)..(14): 2'-hydroxy corresponding base
  modified_base (15)..(15): 2'-hydroxy corresponding base
  modified_base (16)..(16): 2'-hydroxy corresponding base
  modified_base (17)..(17): 2'-hydroxy corresponding base
  modified_base (18)..(18): 2'-hydroxy corresponding base
  modified_base (19)..(19): 2'-hydroxy corresponding base
  modified_base (20)..(20): deoxythymidine
  modified_base (21)..(21): deoxythymidine
cugucucagccaacccgcutt

SEQ ID NO: 1030 - DNA, 21 bp, Artificial Sequence
  Description of Artificial Sequence: Synthetic oligonucleotide
  Description of Combined DNA/RNA Molecule: Synthetic oligonucleotide
  siRNAs to PCSK9
  modified_base (1)..(1): 2'-hydroxy corresponding base
  modified_base (2)..(2): 2'-hydroxy corresponding base
  modified_base (3)..(3): 2'-hydroxy corresponding base
  modified_base (4)..(4): 2'-hydroxy corresponding base
  modified_base (5)..(5): 2'-hydroxy corresponding base
  modified_base (6)..(6): 2'-hydroxy corresponding base
  modified_base (7)..(7): 2'-hydroxy corresponding base
  modified_base (8)..(8): 2'-hydroxy corresponding base
  modified_base (9)..(9): 2'-hydroxy corresponding base
  modified_base (10)..(10): 2'-hydroxy corresponding base
  modified_base (11)..(11): 2'-hydroxy corresponding base
  modified_base (12)..(12): 2'-hydroxy corresponding base
  modified_base (13)..(13): 2'-hydroxy corresponding base
  modified_base (14)..(14): 2'-hydroxy corresponding base
  modified_base (15)..(15): 2'-hydroxy corresponding base
  modified_base (16)..(16): 2'-hydroxy corresponding base
  modified_base (17)..(17): 2'-hydroxy corresponding base
  modified_base (18)..(18): 2'-hydroxy corresponding base
  modified_base (19)..(19): 2'-hydroxy corresponding base
  modified_base (20)..(20): deoxythymidine
  modified_base (21)..(21): deoxythymidine
agcggguuggcugagacagtt

SEQ ID NO: 1031 - DNA, 21 bp, Artificial Sequence
  Description of Artificial Sequence: Synthetic oligonucleotide
  Description of Combined DNA/RNA Molecule: Synthetic oligonucleotide
  siRNAs to PCSK9
  modified_base (1)..(1): 2'-hydroxy corresponding base
  modified_base (2)..(2): 2'-hydroxy corresponding base
  modified_base (3)..(3): 2'-hydroxy corresponding base
  modified_base (4)..(4): 2'-hydroxy corresponding base
  modified_base (5)..(5): 2'-hydroxy corresponding base
  modified_base (6)..(6): 2'-hydroxy corresponding base
  modified_base (7)..(7): 2'-hydroxy corresponding base
  modified_base (8)..(8): 2'-hydroxy corresponding base
  modified_base (9)..(9): 2'-hydroxy corresponding base
  modified_base (10)..(10): 2'-hydroxy corresponding base
  modified_base (11)..(11): 2'-hydroxy corresponding base
  modified_base (12)..(12): 2'-hydroxy corresponding base
  modified_base (13)..(13): 2'-hydroxy corresponding base
  modified_base (14)..(14): 2'-hydroxy corresponding base
  modified_base (15)..(15): 2'-hydroxy corresponding base
  modified_base (16)..(16): 2'-hydroxy corresponding base
  modified_base (17)..(17): 2'-hydroxy corresponding base
  modified_base (18)..(18): 2'-hydroxy corresponding base
  modified_base (19)..(19): 2'-hydroxy corresponding base
  modified_base (20)..(20): deoxythymidine
  modified_base (21)..(21): 5'-thio thymidine
cucagccaacccgcuccactt

SEQ ID NO: 1032 - DNA, 21 bp, Artificial Sequence
  Description of Artificial Sequence: Synthetic oligonucleotide
  Description of Combined DNA/RNA Molecule: Synthetic oligonucleotide
  siRNAs to PCSK9
  modified_base (1)..(1): 2'-hydroxy corresponding base
  modified_base (2)..(2): 2'-hydroxy corresponding base
  modified_base (3)..(3): 2'-hydroxy corresponding base
  modified_base (4)..(4): 2'-hydroxy corresponding base
  modified_base (5)..(5): 2'-hydroxy corresponding base
  modified_base (6)..(6): 2'-hydroxy corresponding base
  modified_base (7)..(7): 2'-hydroxy corresponding base
  modified_base (8)..(8): 2'-hydroxy corresponding base
  modified_base (9)..(9): 2'-hydroxy corresponding base
  modified_base (10)..(10): 2'-hydroxy corresponding base
  modified_base (11)..(11): 2'-hydroxy corresponding base
  modified_base (12)..(12): 2'-hydroxy corresponding base
  modified_base (13)..(13): 2'-hydroxy corresponding base
  modified_base (14)..(14): 2'-hydroxy corresponding base
  modified_base (15)..(15): 2'-hydroxy corresponding base
  modified_base (16)..(16): 2'-hydroxy corresponding base
  modified_base (17)..(17): 2'-hydroxy corresponding base
  modified_base (18)..(18): 2'-hydroxy corresponding base
  modified_base (19)..(19): 2'-hydroxy corresponding base
  modified_base (20)..(20): deoxythymidine
  modified_base (21)..(21): 5'-thio thymidine
guggagcggguuggcugagtt

SEQ ID NO: 1033 - DNA, 21 bp, Artificial Sequence
  Description of Artificial Sequence: Synthetic oligonucleotide
  Description of Combined DNA/RNA Molecule: Synthetic oligonucleotide
  siRNAs to PCSK9
  modified_base (1)..(1): 2'-O-methyl corresponding base
  modified_base (2)..(2): 2'-O-methyl corresponding base
  modified_base (3)..(3): 2'-O-methyl corresponding base
  modified_base (4)..(4): 2'-hydroxy corresponding base
  modified_base (5)..(5): 2'-hydroxy corresponding base
  modified_base (6)..(6): 2'-O-methyl corresponding base
  modified_base (7)..(7): 2'-O-methyl corresponding base
  modified_base (8)..(8): 2'-hydroxy corresponding base
  modified_base (9)..(9): 2'-hydroxy corresponding base
  modified_base (10)..(10): 2'-O-methyl corresponding base
  modified_base (11)..(11): 2'-O-methyl corresponding base
  modified_base (12)..(12): 2'-O-methyl corresponding base
  modified_base (13)..(13): 2'-hydroxy corresponding base
  modified_base (14)..(14): 2'-O-methyl corresponding base
  modified_base (15)..(15): 2'-O-methyl corresponding base
  modified_base (16)..(16): 2'-O-methyl corresponding base
  modified_base (17)..(17): 2'-O-methyl corresponding base
  modified_base (18)..(18): 2'-hydroxy corresponding base
  modified_base (19)..(19): 2'-O-methyl corresponding base
  modified_base (20)..(20): deoxythymidine
  modified_base (21)..(21): 5'-thio thymidine
cucagccaacccgcuccactt

SEQ ID NO: 1034 - DNA, 21 bp, Artificial Sequence
  Description of Artificial Sequence: Synthetic oligonucleotide
  Description of Combined DNA/RNA Molecule: Synthetic oligonucleotide
  siRNAs to PCSK9
  modified_base (1)..(1): 2'-hydroxy corresponding base
  modified_base (2)..(2): 2'-hydroxy corresponding base
  modified_base (3)..(3): 2'-hydroxy corresponding base
  modified_base (4)..(4): 2'-hydroxy corresponding base
  modified_base (5)..(5): 2'-hydroxy corresponding base
  modified_base (6)..(6): 2'-hydroxy corresponding base
  modified_base (7)..(7): 2'-hydroxy corresponding base
  modified_base (8)..(8): 2'-hydroxy corresponding base
  modified_base (9)..(9): 2'-hydroxy corresponding base
  modified_base (10)..(10): 2'-hydroxy corresponding base
  modified_base (11)..(11): 2'-hydroxy corresponding base
  modified_base (12)..(12): 2'-hydroxy corresponding base
  modified_base (13)..(13): 2'-hydroxy corresponding base
  modified_base (14)..(14): 2'-hydroxy corresponding base
  modified_base (15)..(15): 2'-hydroxy corresponding base
  modified_base (16)..(16): 2'-hydroxy corresponding base
  modified_base (17)..(17): 2'-hydroxy corresponding base
  modified_base (18)..(18): 2'-hydroxy corresponding base
  modified_base (19)..(19): 2'-hydroxy corresponding base
  modified_base (20)..(20): deoxythymidine
  modified_base (21)..(21): 5'-thio thymidine
guggagcggguuggcugagtt

SEQ ID NO: 1035 - DNA, 21 bp, Artificial Sequence
  Description of Artificial Sequence: Synthetic oligonucleotide
  Description of Combined DNA/RNA Molecule: Synthetic oligonucleotide
  siRNAs to PCSK9
  modified_base (1)..(1): 2'-hydroxy corresponding base
  modified_base (2)..(2): 2'-hydroxy corresponding base
  modified_base (3)..(3): 2'-hydroxy corresponding base
  modified_base (4)..(4): 2'-hydroxy corresponding base
  modified_base (5)..(5): 2'-hydroxy corresponding base
  modified_base (6)..(6): 2'-hydroxy corresponding base
  modified_base (7)..(7): 2'-hydroxy corresponding base
  modified_base (8)..(8): 2'-hydroxy corresponding base
  modified_base (9)..(9): 2'-hydroxy corresponding base
  modified_base (10)..(10): 2'-hydroxy corresponding base
  modified_base (11)..(11): 2'-hydroxy corresponding base
  modified_base (12)..(12): 2'-hydroxy corresponding base
  modified_base (13)..(13): 2'-hydroxy corresponding base
  modified_base (14)..(14): 2'-hydroxy corresponding base
  modified_base (15)..(15): 2'-hydroxy corresponding base
  modified_base (16)..(16): 2'-hydroxy corresponding base
  modified_base (17)..(17): 2'-hydroxy corresponding base
  modified_base (18)..(18): 2'-hydroxy corresponding base
  modified_base (19)..(19): 2'-hydroxy corresponding base
  modified_base (20)..(20): deoxythymidine
  modified_base (21)..(21): 5'-thio thymidine
gccaacccgcuccacuacctt

SEQ ID NO: 1036 - DNA, 21 bp, Artificial Sequence
  Description of Artificial Sequence: Synthetic oligonucleotide
  Description of Combined DNA/RNA Molecule: Synthetic oligonucleotide
  siRNAs to PCSK9
  modified_base (1)..(1): 2'-hydroxy corresponding base
  modified_base (2)..(2): 2'-hydroxy corresponding base
  modified_base (3)..(3): 2'-hydroxy corresponding base
  modified_base (4)..(4): 2'-hydroxy corresponding base
  modified_base (5)..(5): 2'-hydroxy corresponding base
  modified_base (6)..(6): 2'-hydroxy corresponding base
  modified_base (7)..(7): 2'-hydroxy corresponding base
  modified_base (8)..(8): 2'-hydroxy corresponding base
  modified_base (9)..(9): 2'-hydroxy corresponding base
  modified_base (10)..(10): 2'-hydroxy corresponding base
  modified_base (11)..(11): 2'-hydroxy corresponding base
  modified_base (12)..(12): 2'-hydroxy corresponding base
  modified_base (13)..(13): 2'-hydroxy corresponding base
  modified_base (14)..(14): 2'-hydroxy corresponding base
  modified_base (15)..(15): 2'-hydroxy corresponding base
  modified_base (16)..(16): 2'-hydroxy corresponding base
  modified_base (17)..(17): 2'-hydroxy corresponding base
  modified_base (18)..(18): 2'-hydroxy corresponding base
  modified_base (19)..(19): 2'-hydroxy corresponding base
  modified_base (20)..(20): deoxythymidine
  modified_base (21)..(21): 5'-thio thymidine
gguaguggagcggguuggctt

SEQ ID NO: 1037 - DNA, 21 bp, Artificial Sequence
  Description of Artificial Sequence: Synthetic oligonucleotide
  Description of Combined DNA/RNA Molecule: Synthetic oligonucleotide
  siRNAs to PCSK9
  modified_base (1)..(1): 2'-hydroxy corresponding base
  modified_base (2)..(2): 2'-O-methyl corresponding base
  modified_base (3)..(3): 2'-O-methyl corresponding base
  modified_base (4)..(4): 2'-hydroxy corresponding base
  modified_base (5)..(5): 2'-hydroxy corresponding base
  modified_base (6)..(6): 2'-O-methyl corresponding base
  modified_base (7)..(7): 2'-O-methyl corresponding base
  modified_base (8)..(8): 2'-O-methyl corresponding base
  modified_base (9)..(9): 2'-hydroxy corresponding base
  modified_base (10)..(10): 2'-O-methyl corresponding base
  modified_base (11)..(11): 2'-O-methyl corresponding base
  modified_base (12)..(12): 2'-O-methyl corresponding base
  modified_base (13)..(13): 2'-O-methyl corresponding base
  modified_base (14)..(14): 2'-hydroxy corresponding base
  modified_base (15)..(15): 2'-O-methyl corresponding base
  modified_base (16)..(16): 2'-O-methyl corresponding base
  modified_base (17)..(17): 2'-hydroxy corresponding base
  modified_base (18)..(18): 2'-O-methyl corresponding base
  modified_base (19)..(19): 2'-O-methyl corresponding base
  modified_base (20)..(20): deoxythymidine
  modified_base (21)..(21): 5'-thio thymidine
gccaacccgcuccacuacctt

SEQ ID NO: 1038 - DNA, 21 bp, Artificial Sequence
  Description of Artificial Sequence: Synthetic oligonucleotide
  Description of Combined DNA/RNA Molecule: Synthetic oligonucleotide
  siRNAs to PCSK9
  modified_base (1)..(1): 2'-hydroxy corresponding base
  modified_base (2)..(2): 2'-hydroxy corresponding base
  modified_base (3)..(3): 2'-O-methyl corresponding base
  modified_base (4)..(4): 2'-hydroxy corresponding base
  modified_base (5)..(5): 2'-hydroxy corresponding base
  modified_base (6)..(6): 2'-hydroxy corresponding base
  modified_base (7)..(7): 2'-hydroxy corresponding base
  modified_base (8)..(8): 2'-hydroxy corresponding base
  modified_base (9)..(9): 2'-hydroxy corresponding base
  modified_base (10)..(10): 2'-hydroxy corresponding base
  modified_base (11)..(11): 2'-hydroxy corresponding base
  modified_base (12)..(12): 2'-hydroxy corresponding base
  modified_base (13)..(13): 2'-hydroxy corresponding base
  modified_base (14)..(14): 2'-hydroxy corresponding base
  modified_base (15)..(15): 2'-hydroxy corresponding base
  modified_base (16)..(16): 2'-hydroxy corresponding base
  modified_base (17)..(17): 2'-hydroxy corresponding base
  modified_base (18)..(18): 2'-hydroxy corresponding base
  modified_base (19)..(19): 2'-hydroxy corresponding base
  modified_base (20)..(20): deoxythymidine
  modified_base (21)..(21): 5'-thio thymidine
gguaguggagcggguuggctt

SEQ ID NO: 1039 - DNA, 21 bp, Artificial Sequence
  Description of Artificial Sequence: Synthetic oligonucleotide
  Description of Combined DNA/RNA Molecule: Synthetic oligonucleotide
  siRNAs to PCSK9
  modified_base (1)..(1): 2'-hydroxy corresponding base
  modified_base (2)..(2): 2'-hydroxy corresponding base
  modified_base (3)..(3): 2'-hydroxy corresponding base
  modified_base (4)..(4): 2'-hydroxy corresponding base
  modified_base (5)..(5): 2'-hydroxy corresponding base
  modified_base (6)..(6): 2'-hydroxy corresponding base
  modified_base (7)..(7): 2'-hydroxy corresponding base
  modified_base (8)..(8): 2'-hydroxy corresponding base
  modified_base (9)..(9): 2'-hydroxy corresponding base
  modified_base (10)..(10): 2'-hydroxy corresponding base
  modified_base (11)..(11): 2'-hydroxy corresponding base
  modified_base (12)..(12): 2'-hydroxy corresponding base
  modified_base (13)..(13): 2'-hydroxy corresponding base
  modified_base (14)..(14): 2'-hydroxy corresponding base
  modified_base (15)..(15): 2'-hydroxy corresponding base
  modified_base (16)..(16): 2'-hydroxy corresponding base
  modified_base (17)..(17): 2'-hydroxy corresponding base
  modified_base (18)..(18): 2'-hydroxy corresponding base
  modified_base (19)..(19): 2'-hydroxy corresponding base
  modified_base (20)..(20): deoxythymidine
  modified_base (21)..(21): deoxythymidine
aacccgcuccacuacccggtt

SEQ ID NO: 1040 - DNA, 21 bp, Artificial Sequence
  Description of Artificial Sequence: Synthetic oligonucleotide
  Description of Combined DNA/RNA Molecule: Synthetic oligonucleotide
  siRNAs to PCSK9
  modified_base (1)..(1): 2'-hydroxy corresponding base
  modified_base (2)..(2): 2'-hydroxy corresponding base
  modified_base (3)..(3): 2'-hydroxy corresponding base
  modified_base (4)..(4): 2'-hydroxy corresponding base
  modified_base (5)..(5): 2'-hydroxy corresponding base
  modified_base (6)..(6): 2'-hydroxy corresponding base
  modified_base (7)..(7): 2'-hydroxy corresponding base
  modified_base (8)..(8): 2'-hydroxy corresponding base
  modified_base (9)..(9): 2'-hydroxy corresponding base
  modified_base (10)..(10): 2'-hydroxy corresponding base
  modified_base (11)..(11): 2'-hydroxy corresponding base
  modified_base (12)..(12): 2'-hydroxy corresponding base
  modified_base (13)..(13): 2'-hydroxy corresponding base
  modified_base (14)..(14): 2'-hydroxy corresponding base
  modified_base (15)..(15): 2'-hydroxy corresponding base
  modified_base (16)..(16): 2'-hydroxy corresponding base
  modified_base (17)..(17): 2'-hydroxy corresponding base
  modified_base (18)..(18): 2'-hydroxy corresponding base
  modified_base (19)..(19): 2'-hydroxy corresponding base
  modified_base (20)..(20): deoxythymidine
  modified_base (21)..(21): deoxythymidine
ccggguaguggagcggguutt

SEQ ID NO: 1041 - DNA, 21 bp, Artificial Sequence
  Description of Artificial Sequence: Synthetic oligonucleotide
  Description of Combined DNA/RNA Molecule: Synthetic oligonucleotide
  siRNAs to PCSK9
  modified_base (1)..(1): 2'-hydroxy corresponding base
  modified_base (2)..(2): 2'-hydroxy corresponding base
  modified_base (3)..(3): 2'-hydroxy corresponding base
  modified_base (4)..(4): 2'-hydroxy corresponding base
  modified_base (5)..(5): 2'-hydroxy corresponding base
  modified_base (6)..(6): 2'-hydroxy corresponding base
  modified_base (7)..(7): 2'-hydroxy corresponding base
  modified_base (8)..(8): 2'-hydroxy corresponding base
  modified_base (9)..(9): 2'-hydroxy corresponding base
  modified_base (10)..(10): 2'-hydroxy corresponding base
  modified_base (11)..(11): 2'-hydroxy corresponding base
  modified_base (12)..(12): 2'-hydroxy corresponding base
  modified_base (13)..(13): 2'-hydroxy corresponding base
  modified_base (14)..(14): 2'-hydroxy corresponding base
  modified_base (15)..(15): 2'-hydroxy corresponding base
  modified_base (16)..(16): 2'-hydroxy corresponding base
  modified_base (17)..(17): 2'-hydroxy corresponding base
  modified_base (18)..(18): 2'-hydroxy corresponding base
  modified_base (19)..(19): 2'-hydroxy corresponding base
  modified_base (20)..(20): deoxythymidine
  modified_base (21)..(21): deoxythymidine
ccgcuccacuacccggcagtt

SEQ ID NO: 1042 - DNA, 21 bp, Artificial Sequence
  Description of Artificial Sequence: Synthetic oligonucleotide
  Description of Combined DNA/RNA Molecule: Synthetic oligonucleotide
  siRNAs to PCSK9
  modified_base (1)..(1): 2'-hydroxy corresponding base
  modified_base (2)..(2): 2'-hydroxy corresponding base
  modified_base (3)..(3): 2'-hydroxy corresponding base
  modified_base (4)..(4): 2'-hydroxy corresponding base
  modified_base (5)..(5): 2'-hydroxy corresponding base
  modified_base (6)..(6): 2'-hydroxy corresponding base
  modified_base (7)..(7): 2'-hydroxy corresponding base
  modified_base (8)..(8): 2'-hydroxy corresponding base
  modified_base (9)..(9): 2'-hydroxy corresponding base
  modified_base (10)..(10): 2'-hydroxy corresponding base
  modified_base (11)..(11): 2'-hydroxy corresponding base
  modified_base (12)..(12): 2'-hydroxy corresponding base
  modified_base (13)..(13): 2'-hydroxy corresponding base
  modified_base (14)..(14): 2'-hydroxy corresponding base
  modified_base (15)..(15): 2'-hydroxy corresponding base
  modified_base (16)..(16): 2'-hydroxy corresponding base
  modified_base (17)..(17): 2'-hydroxy corresponding base
  modified_base (18)..(18): 2'-hydroxy corresponding base
  modified_base (19)..(19): 2'-hydroxy corresponding base
  modified_base (20)..(20): deoxythymidine
  modified_base (21)..(21): deoxythymidine
cugccggguaguggagcggtt

SEQ ID NO: 1043 - DNA, 21 bp, Artificial Sequence
  Description of Artificial Sequence: Synthetic oligonucleotide
  Description of Combined DNA/RNA Molecule: Synthetic oligonucleotide
  siRNAs to PCSK9
  modified_base (1)..(1): 2'-hydroxy corresponding base
  modified_base (2)..(2): 2'-hydroxy corresponding base
  modified_base (3)..(3): 2'-hydroxy corresponding base
  modified_base (4)..(4): 2'-hydroxy corresponding base
  modified_base (5)..(5): 2'-hydroxy corresponding base
  modified_base (6)..(6): 2'-hydroxy corresponding base
  modified_base (7)..(7): 2'-hydroxy corresponding base
  modified_base (8)..(8): 2'-hydroxy corresponding base
  modified_base (9)..(9): 2'-hydroxy corresponding base
  modified_base (10)..(10): 2'-hydroxy corresponding base
  modified_base (11)..(11): 2'-hydroxy corresponding base
  modified_base (12)..(12): 2'-hydroxy corresponding base
  modified_base (13)..(13): 2'-hydroxy corresponding base
  modified_base (14)..(14): 2'-hydroxy corresponding base
  modified_base (15)..(15): 2'-hydroxy corresponding base
  modified_base (16)..(16): 2'-hydroxy corresponding base
  modified_base (17)..(17): 2'-hydroxy corresponding base
  modified_base (18)..(18): 2'-hydroxy corresponding base
  modified_base (19)..(19): 2'-hydroxy corresponding base
  modified_base (20)..(20): deoxythymidine
  modified_base (21)..(21): deoxythymidine
cuacccggcaggguacacatt

SEQ ID NO: 1044 - DNA, 21 bp, Artificial Sequence
  Description of Artificial Sequence: Synthetic oligonucleotide
  Description of Combined DNA/RNA Molecule: Synthetic oligonucleotide
  siRNAs to PCSK9
  modified_base (1)..(1): 2'-hydroxy corresponding base
  modified_base (2)..(2): 2'-hydroxy corresponding base
  modified_base (3)..(3): 2'-hydroxy corresponding base
  modified_base (4)..(4): 2'-hydroxy corresponding base
  modified_base (5)..(5): 2'-hydroxy corresponding base
  modified_base (6)..(6): 2'-hydroxy corresponding base
  modified_base (7)..(7): 2'-hydroxy corresponding base
  modified_base (8)..(8): 2'-hydroxy corresponding base
  modified_base (9)..(9): 2'-hydroxy corresponding base
  modified_base (10)..(10): 2'-hydroxy corresponding base
  modified_base (11)..(11): 2'-hydroxy corresponding base
  modified_base (12)..(12): 2'-hydroxy corresponding base
  modified_base (13)..(13): 2'-hydroxy corresponding base
  modified_base (14)..(14): 2'-hydroxy corresponding base
  modified_base (15)..(15): 2'-hydroxy corresponding base
  modified_base (16)..(16): 2'-hydroxy corresponding base
  modified_base (17)..(17): 2'-hydroxy corresponding base
  modified_base (18)..(18): 2'-hydroxy corresponding base
  modified_base (19)..(19): 2'-hydroxy corresponding base
  modified_base (20)..(20): deoxythymidine
  modified_base (21)..(21): deoxythymidine
uguguacccugccggguagtt

SEQ ID NO: 1045 - DNA, 21 bp, Artificial Sequence
  Description of Artificial Sequence: Synthetic oligonucleotide
  Description of Combined DNA/RNA Molecule: Synthetic oligonucleotide
  siRNAs to PCSK9
  modified_base (1)..(1): 2'-hydroxy corresponding base
  modified_base (2)..(2): 2'-hydroxy corresponding base
  modified_base (3)..(3): 2'-hydroxy corresponding base
  modified_base (4)..(4): 2'-hydroxy corresponding base
  modified_base (5)..(5): 2'-hydroxy corresponding base
  modified_base (6)..(6): 2'-hydroxy corresponding base
  modified_base (7)..(7): 2'-hydroxy corresponding base
  modified_base (8)..(8): 2'-hydroxy corresponding base
  modified_base (9)..(9): 2'-hydroxy corresponding base
  modified_base (10)..(10): 2'-hydroxy corresponding base
  modified_base (11)..(11): 2'-hydroxy corresponding base
  modified_base (12)..(12): 2'-hydroxy corresponding base
  modified_base (13)..(13): 2'-hydroxy corresponding base
  modified_base (14)..(14): 2'-hydroxy corresponding base
  modified_base (15)..(15): 2'-hydroxy corresponding base
  modified_base (16)..(16): 2'-hydroxy corresponding base
  modified_base (17)..(17): 2'-hydroxy corresponding base
  modified_base (18)..(18): 2'-hydroxy corresponding base
  modified_base (19)..(19): 2'-hydroxy corresponding base
  modified_base (20)..(20): deoxythymidine
  modified_base (21)..(21): deoxythymidine
uacccggcaggguacacautt

SEQ ID NO: 1046 - DNA, 21 bp, Artificial Sequence
  Description of Artificial Sequence: Synthetic oligonucleotide
  Description of Combined DNA/RNA Molecule: Synthetic oligonucleotide
  siRNAs to PCSK9
  modified_base (1)..(1): 2'-hydroxy corresponding base
  modified_base (2)..(2): 2'-hydroxy corresponding base
  modified_base (3)..(3): 2'-hydroxy corresponding base
  modified_base (4)..(4): 2'-hydroxy corresponding base
  modified_base (5)..(5): 2'-hydroxy corresponding base
  modified_base (6)..(6): 2'-hydroxy corresponding base
  modified_base (7)..(7): 2'-hydroxy corresponding base
  modified_base (8)..(8): 2'-hydroxy corresponding base
  modified_base (9)..(9): 2'-hydroxy corresponding base
  modified_base (10)..(10): 2'-hydroxy corresponding base
  modified_base (11)..(11): 2'-hydroxy corresponding base
  modified_base (12)..(12): 2'-hydroxy corresponding base
  modified_base (13)..(13): 2'-hydroxy corresponding base
  modified_base (14)..(14): 2'-hydroxy corresponding base
  modified_base (15)..(15): 2'-hydroxy corresponding base
  modified_base (16)..(16): 2'-hydroxy corresponding base
  modified_base (17)..(17): 2'-hydroxy corresponding base
  modified_base (18)..(18): 2'-hydroxy corresponding base
  modified_base (19)..(19): 2'-hydroxy corresponding base
  modified_base (20)..(20): deoxythymidine
  modified_base (21)..(21): deoxythymidine
auguguacccugccggguatt

SEQ ID NO: 1047 - DNA, 21 bp, Artificial Sequence
  Description of Artificial Sequence: Synthetic oligonucleotide
  Description of Combined DNA/RNA Molecule: Synthetic oligonucleotide
  siRNAs to PCSK9
  modified_base (1)..(1): 2'-hydroxy corresponding base
  modified_base (2)..(2): 2'-hydroxy corresponding base
  modified_base (3)..(3): 2'-hydroxy corresponding base
  modified_base (4)..(4): 2'-hydroxy corresponding base
  modified_base (5)..(5): 2'-hydroxy corresponding base
  modified_base (6)..(6): 2'-hydroxy corresponding base
  modified_base (7)..(7): 2'-hydroxy corresponding base
  modified_base (8)..(8): 2'-hydroxy corresponding base
  modified_base (9)..(9): 2'-hydroxy corresponding base
  modified_base (10)..(10): 2'-hydroxy corresponding base
  modified_base (11)..(11): 2'-hydroxy corresponding base
  modified_base (12)..(12): 2'-hydroxy corresponding base
  modified_base (13)..(13): 2'-hydroxy corresponding base
  modified_base (14)..(14): 2'-hydroxy corresponding base
  modified_base (15)..(15): 2'-hydroxy corresponding base
  modified_base (16)..(16): 2'-hydroxy corresponding base
  modified_base (17)..(17): 2'-hydroxy corresponding base
  modified_base (18)..(18): 2'-hydroxy corresponding base
  modified_base (19)..(19): 2'-hydroxy corresponding base
  modified_base (20)..(20): deoxythymidine
  modified_base (21)..(21): deoxythymidine
acccggcaggguacacauutt

SEQ ID NO: 1048 - DNA, 21 bp, Artificial Sequence
  Description of Artificial Sequence: Synthetic oligonucleotide
  Description of Combined DNA/RNA Molecule: Synthetic oligonucleotide
  siRNAs to PCSK9
  modified_base (1)..(1): 2'-hydroxy corresponding base
  modified_base (2)..(2): 2'-hydroxy corresponding base
  modified_base (3)..(3): 2'-hydroxy corresponding base
  modified_base (4)..(4): 2'-hydroxy corresponding base
  modified_base (5)..(5): 2'-hydroxy corresponding base
  modified_base (6)..(6): 2'-hydroxy corresponding base
  modified_base (7)..(7): 2'-hydroxy corresponding base
  modified_base (8)..(8): 2'-hydroxy corresponding base
  modified_base (9)..(9): 2'-hydroxy corresponding base
  modified_base (10)..(10): 2'-hydroxy corresponding base
  modified_base (11)..(11): 2'-hydroxy corresponding base
  modified_base (12)..(12): 2'-hydroxy corresponding base
  modified_base (13)..(13): 2'-hydroxy corresponding base
  modified_base (14)..(14): 2'-hydroxy corresponding base
  modified_base (15)..(15): 2'-hydroxy corresponding base
  modified_base (16)..(16): 2'-hydroxy corresponding base
  modified_base (17)..(17): 2'-hydroxy corresponding base
  modified_base (18)..(18): 2'-hydroxy corresponding base
  modified_base (19)..(19): 2'-hydroxy corresponding base
  modified_base (20)..(20): deoxythymidine
  modified_base (21)..(21): deoxythymidine
aauguguacccugccgggutt

SEQ ID NO: 1049 - DNA, 21 bp, Artificial Sequence
  Description of Artificial Sequence: Synthetic oligonucleotide
  Description of Combined DNA/RNA Molecule: Synthetic oligonucleotide
  siRNAs to PCSK9
  modified_base (1)..(1): 2'-hydroxy corresponding base
  modified_base (2)..(2): 2'-hydroxy corresponding base
  modified_base (3)..(3): 2'-hydroxy corresponding base
  modified_base (4)..(4): 2'-hydroxy corresponding base
  modified_base (5)..(5): 2'-hydroxy corresponding base
  modified_base (6)..(6): 2'-hydroxy corresponding base
  modified_base (7)..(7): 2'-hydroxy corresponding base
  modified_base (8)..(8): 2'-hydroxy corresponding base
  modified_base (9)..(9): 2'-hydroxy corresponding base
  modified_base (10)..(10): 2'-hydroxy corresponding base
  modified_base (11)..(11): 2'-hydroxy corresponding base
  modified_base (12)..(12): 2'-hydroxy corresponding base
  modified_base (13)..(13): 2'-hydroxy corresponding base
  modified_base (14)..(14): 2'-hydroxy corresponding base
  modified_base (15)..(15): 2'-hydroxy corresponding base
  modified_base (16)..(16): 2'-hydroxy corresponding base
  modified_base (17)..(17): 2'-hydroxy corresponding base
  modified_base (18)..(18): 2'-hydroxy corresponding base
  modified_base (19)..(19): 2'-hydroxy corresponding base
  modified_base (20)..(20): deoxythymidine
  modified_base (21)..(21): deoxythymidine
cccggcaggguacacauuctt

SEQ ID NO: 1050 - DNA, 21 bp, Artificial Sequence
  Description of Artificial Sequence: Synthetic oligonucleotide
  Description of Combined DNA/RNA Molecule: Synthetic oligonucleotide
  siRNAs to PCSK9
  modified_base (1)..(1): 2'-hydroxy corresponding base
  modified_base (2)..(2): 2'-hydroxy corresponding base
  modified_base (3)..(3): 2'-hydroxy corresponding base
  modified_base (4)..(4): 2'-hydroxy corresponding base
  modified_base (5)..(5): 2'-hydroxy corresponding base
  modified_base (6)..(6): 2'-hydroxy corresponding base
  modified_base (7)..(7): 2'-hydroxy corresponding base
  modified_base (8)..(8): 2'-hydroxy corresponding base
  modified_base (9)..(9): 2'-hydroxy corresponding base
  modified_base (10)..(10): 2'-hydroxy corresponding base
  modified_base (11)..(11): 2'-hydroxy corresponding base
  modified_base (12)..(12): 2'-hydroxy corresponding base
  modified_base (13)..(13): 2'-hydroxy corresponding base
  modified_base (14)..(14): 2'-hydroxy corresponding base
  modified_base (15)..(15): 2'-hydroxy corresponding base
  modified_base (16)..(16): 2'-hydroxy corresponding base
  modified_base (17)..(17): 2'-hydroxy corresponding base
  modified_base (18)..(18): 2'-hydroxy corresponding base
  modified_base (19)..(19): 2'-hydroxy corresponding base
  modified_base (20)..(20): deoxythymidine
  modified_base (21)..(21): deoxythymidine
gaauguguacccugccgggtt

SEQ ID NO: 1051 - DNA, 21 bp, Artificial Sequence
  Description of Artificial Sequence: Synthetic oligonucleotide
  Description of Combined DNA/RNA Molecule: Synthetic oligonucleotide
  siRNAs to PCSK9
  modified_base (1)..(1): 2'-hydroxy corresponding base
  modified_base (2)..(2): 2'-hydroxy corresponding base
  modified_base (3)..(3): 2'-hydroxy corresponding base
  modified_base (4)..(4): 2'-hydroxy corresponding base
  modified_base (5)..(5): 2'-hydroxy corresponding base
  modified_base (6)..(6): 2'-hydroxy corresponding base
  modified_base (7)..(7): 2'-hydroxy corresponding base
  modified_base (8)..(8): 2'-hydroxy corresponding base
  modified_base (9)..(9): 2'-hydroxy corresponding base
  modified_base (10)..(10): 2'-hydroxy corresponding base
  modified_base (11)..(11): 2'-hydroxy corresponding base
  modified_base (12)..(12): 2'-hydroxy corresponding base
  modified_base (13)..(13): 2'-hydroxy corresponding base
  modified_base (14)..(14): 2'-hydroxy corresponding base
  modified_base (15)..(15): 2'-hydroxy corresponding base
  modified_base (16)..(16): 2'-hydroxy corresponding base
  modified_base (17)..(17): 2'-hydroxy corresponding base
  modified_base (18)..(18): 2'-hydroxy corresponding base
  modified_base (19)..(19): 2'-hydroxy corresponding base
  modified_base (20)..(20): deoxythymidine
  modified_base (21)..(21): deoxythymidine
cggcaggguacacauucgctt

SEQ ID NO: 1052 - DNA, 21 bp, Artificial Sequence
  Description of Artificial Sequence: Synthetic oligonucleotide
  Description of Combined DNA/RNA Molecule: Synthetic oligonucleotide
  siRNAs to PCSK9
  modified_base (1)..(1): 2'-hydroxy corresponding base
  modified_base (2)..(2): 2'-hydroxy corresponding base
  modified_base (3)..(3): 2'-hydroxy corresponding base
  modified_base (4)..(4): 2'-hydroxy corresponding base
  modified_base (5)..(5): 2'-hydroxy corresponding base
  modified_base (6)..(6): 2'-hydroxy corresponding base
  modified_base (7)..(7): 2'-hydroxy corresponding base
  modified_base (8)..(8): 2'-hydroxy corresponding base
  modified_base (9)..(9): 2'-hydroxy corresponding base
  modified_base (10)..(10): 2'-hydroxy corresponding base
  modified_base (11)..(11): 2'-hydroxy corresponding base
  modified_base (12)..(12): 2'-hydroxy corresponding base
  modified_base (13)..(13): 2'-hydroxy corresponding base
  modified_base (14)..(14): 2'-hydroxy corresponding base
  modified_base (15)..(15): 2'-hydroxy corresponding base
  modified_base (16)..(16): 2'-hydroxy corresponding base
  modified_base (17)..(17): 2'-hydroxy corresponding base
  modified_base (18)..(18): 2'-hydroxy corresponding base
  modified_base (19)..(19): 2'-hydroxy corresponding base
  modified_base (20)..(20): deoxythymidine
  modified_base (21)..(21): deoxythymidine
gcgaauguguacccugccgtt

SEQ ID NO: 1053 - DNA, 21 bp, Artificial Sequence
  Description of Artificial Sequence: Synthetic oligonucleotide
  Description of Combined DNA/RNA Molecule: Synthetic oligonucleotide
  siRNAs to PCSK9
  modified_base (1)..(1): 2'-hydroxy corresponding base
  modified_base (2)..(2): 2'-hydroxy corresponding base
  modified_base (3)..(3): 2'-hydroxy corresponding base
  modified_base (4)..(4): 2'-hydroxy corresponding base
  modified_base (5)..(5): 2'-hydroxy corresponding base
  modified_base (6)..(6): 2'-hydroxy corresponding base
  modified_base (7)..(7): 2'-hydroxy corresponding base
  modified_base (8)..(8): 2'-hydroxy corresponding base
  modified_base (9)..(9): 2'-hydroxy corresponding base
  modified_base (10)..(10): 2'-hydroxy corresponding base
  modified_base (11)..(11): 2'-hydroxy corresponding base
  modified_base (12)..(12): 2'-hydroxy corresponding base
  modified_base (13)..(13): 2'-hydroxy corresponding base
  modified_base (14)..(14): 2'-hydroxy corresponding base
  modified_base (15)..(15): 2'-hydroxy corresponding base
  modified_base (16)..(16): 2'-hydroxy corresponding base
  modified_base (17)..(17): 2'-hydroxy corresponding base
  modified_base (18)..(18): 2'-hydroxy corresponding base
  modified_base (19)..(19): 2'-hydroxy corresponding base
  modified_base (20)..(20): deoxythymidine
  modified_base (21)..(21): deoxythymidine
gcaggguacacauucgcactt

SEQ ID NO: 1054 - DNA, 21 bp, Artificial Sequence
  Description of Artificial Sequence: Synthetic oligonucleotide
  Description of Combined DNA/RNA Molecule: Synthetic oligonucleotide
  siRNAs to PCSK9
  modified_base (1)..(1): 2'-hydroxy corresponding base
  modified_base (2)..(2): 2'-hydroxy corresponding base
  modified_base (3)..(3): 2'-hydroxy corresponding base
  modified_base (4)..(4): 2'-hydroxy corresponding base
  modified_base (5)..(5): 2'-hydroxy corresponding base
  modified_base (6)..(6): 2'-hydroxy corresponding base
  modified_base (7)..(7): 2'-hydroxy corresponding base
  modified_base (8)..(8): 2'-hydroxy corresponding base
  modified_base (9)..(9): 2'-hydroxy corresponding base
  modified_base (10)..(10): 2'-hydroxy corresponding base
  modified_base (11)..(11): 2'-hydroxy corresponding base
  modified_base (12)..(12): 2'-hydroxy corresponding base
  modified_base (13)..(13): 2'-hydroxy corresponding base
  modified_base (14)..(14): 2'-hydroxy corresponding base
  modified_base (15)..(15): 2'-hydroxy corresponding base
  modified_base (16)..(16): 2'-hydroxy corresponding base
  modified_base (17)..(17): 2'-hydroxy corresponding base
  modified_base (18)..(18): 2'-hydroxy corresponding base
  modified_base (19)..(19): 2'-hydroxy corresponding base
  modified_base (20)..(20): deoxythymidine
  modified_base (21)..(21): deoxythymidine
gugcgaauguguacccugctt

SEQ ID NO: 1055 - DNA, 21 bp, Artificial Sequence
  Description of Artificial Sequence: Synthetic oligonucleotide
  Description of Combined DNA/RNA Molecule: Synthetic oligonucleotide
  siRNAs to PCSK9
  modified_base (1)..(1): 2'-hydroxy corresponding base
  modified_base (2)..(2): 2'-hydroxy corresponding base
  modified_base (3)..(3): 2'-hydroxy corresponding base
  modified_base (4)..(4): 2'-hydroxy corresponding base
  modified_base (5)..(5): 2'-hydroxy corresponding base
  modified_base (6)..(6): 2'-hydroxy corresponding base
  modified_base (7)..(7): 2'-hydroxy corresponding base
  modified_base (8)..(8): 2'-hydroxy corresponding base
  modified_base (9)..(9): 2'-hydroxy corresponding base
  modified_base (10)..(10): 2'-hydroxy corresponding base
  modified_base (11)..(11): 2'-hydroxy corresponding base
  modified_base (12)..(12): 2'-hydroxy corresponding base
  modified_base (13)..(13): 2'-hydroxy corresponding base
  modified_base (14)..(14): 2'-hydroxy corresponding base
  modified_base (15)..(15): 2'-hydroxy corresponding base
  modified_base (16)..(16): 2'-hydroxy corresponding base
  modified_base (17)..(17): 2'-hydroxy corresponding base
  modified_base (18)..(18): 2'-hydroxy corresponding base
  modified_base (19)..(19): 2'-hydroxy corresponding base
  modified_base (20)..(20): deoxythymidine
  modified_base (21)..(21): deoxythymidine
caggguacacauucgcacctt

SEQ ID NO: 1056 - DNA, 21 bp, Artificial Sequence
  Description of Artificial Sequence: Synthetic oligonucleotide
  Description of Combined DNA/RNA Molecule: Synthetic oligonucleotide
  siRNAs to PCSK9
  modified_base (1)..(1): 2'-hydroxy corresponding base
  modified_base (2)..(2): 2'-hydroxy corresponding base
  modified_base (3)..(3): 2'-hydroxy corresponding base
  modified_base (4)..(4): 2'-hydroxy corresponding base
  modified_base (5)..(5): 2'-hydroxy corresponding base
  modified_base (6)..(6): 2'-hydroxy corresponding base
  modified_base (7)..(7): 2'-hydroxy corresponding base
  modified_base (8)..(8): 2'-hydroxy corresponding base
  modified_base (9)..(9): 2'-hydroxy corresponding base
  modified_base (10)..(10): 2'-hydroxy corresponding base
  modified_base (11)..(11): 2'-hydroxy corresponding base
  modified_base (12)..(12): 2'-hydroxy corresponding base
  modified_base (13)..(13): 2'-hydroxy corresponding base
  modified_base (14)..(14): 2'-hydroxy corresponding base
  modified_base (15)..(15): 2'-hydroxy corresponding base
  modified_base (16)..(16): 2'-hydroxy corresponding base
  modified_base (17)..(17): 2'-hydroxy corresponding base
  modified_base (18)..(18): 2'-hydroxy corresponding base
  modified_base (19)..(19): 2'-hydroxy corresponding base
  modified_base (20)..(20): deoxythymidine
  modified_base (21)..(21): deoxythymidine
ggugcgaauguguacccugtt

SEQ ID NO: 1057 - DNA, 21 bp, Artificial Sequence
  Description of Artificial Sequence: Synthetic oligonucleotide
  Description of Combined DNA/RNA Molecule: Synthetic oligonucleotide
  siRNAs to PCSK9
  modified_base (1)..(1): 2'-hydroxy corresponding base
  modified_base (2)..(2): 2'-hydroxy corresponding base
  modified_base (3)..(3): 2'-hydroxy corresponding base
  modified_base (4)..(4): 2'-hydroxy corresponding base
  modified_base (5)..(5): 2'-hydroxy corresponding base
  modified_base (6)..(6): 2'-hydroxy corresponding base
  modified_base (7)..(7): 2'-hydroxy corresponding base
  modified_base (8)..(8): 2'-hydroxy corresponding base
  modified_base (9)..(9): 2'-hydroxy corresponding base
  modified_base (10)..(10): 2'-hydroxy corresponding base
  modified_base (11)..(11): 2'-hydroxy corresponding base
  modified_base (12)..(12): 2'-hydroxy corresponding base
  modified_base (13)..(13): 2'-hydroxy corresponding base
  modified_base (14)..(14): 2'-hydroxy corresponding base
  modified_base (15)..(15): 2'-hydroxy corresponding base
  modified_base (16)..(16): 2'-hydroxy corresponding base
  modified_base (17)..(17): 2'-hydroxy corresponding base
  modified_base (18)..(18): 2'-hydroxy corresponding base
  modified_base (19)..(19): 2'-hydroxy corresponding base
  modified_base (20)..(20): deoxythymidine
  modified_base (21)..(21): deoxythymidine
aggguacacauucgcaccctt

SEQ ID NO: 1058 - DNA, 21 bp, Artificial Sequence
  Description of Artificial Sequence: Synthetic oligonucleotide
  Description of Combined DNA/RNA Molecule: Synthetic oligonucleotide
  siRNAs to PCSK9
  modified_base (1)..(1): 2'-hydroxy corresponding base
  modified_base (2)..(2): 2'-hydroxy corresponding base
  modified_base (3)..(3): 2'-hydroxy corresponding base
  modified_base (4)..(4): 2'-hydroxy corresponding base
  modified_base (5)..(5): 2'-hydroxy corresponding base
  modified_base (6)..(6): 2'-hydroxy corresponding base
  modified_base (7)..(7): 2'-hydroxy corresponding base
  modified_base (8)..(8): 2'-hydroxy corresponding base
  modified_base (9)..(9): 2'-hydroxy corresponding base
  modified_base (10)..(10): 2'-hydroxy corresponding base
  modified_base (11)..(11): 2'-hydroxy corresponding base
  modified_base (12)..(12): 2'-hydroxy corresponding base
  modified_base (13)..(13): 2'-hydroxy corresponding base
  modified_base (14)..(14): 2'-hydroxy corresponding base
  modified_base (15)..(15): 2'-hydroxy corresponding base
  modified_base (16)..(16): 2'-hydroxy corresponding base
  modified_base (17)..(17): 2'-hydroxy corresponding base
  modified_base (18)..(18): 2'-hydroxy corresponding base
  modified_base (19)..(19): 2'-hydroxy corresponding base
  modified_base (20)..(20): deoxythymidine
  modified_base (21)..(21): deoxythymidine
gggugcgaauguguacccutt

SEQ ID NO: 1059 - DNA, 21 bp, Artificial Sequence
  Description of Artificial Sequence: Synthetic oligonucleotide
  Description of Combined DNA/RNA Molecule: Synthetic oligonucleotide
  siRNAs to PCSK9
  modified_base (1)..(1): 2'-hydroxy corresponding base
  modified_base (2)..(2): 2'-hydroxy corresponding base
  modified_base (3)..(3): 2'-hydroxy corresponding base
  modified_base (4)..(4): 2'-hydroxy corresponding base
  modified_base (5)..(5): 2'-hydroxy corresponding base
  modified_base (6)..(6): 2'-hydroxy corresponding base
  modified_base (7)..(7): 2'-hydroxy corresponding base
  modified_base (8)..(8): 2'-hydroxy corresponding base
  modified_base (9)..(9): 2'-hydroxy corresponding base
  modified_base (10)..(10): 2'-hydroxy corresponding base
  modified_base (11)..(11): 2'-hydroxy corresponding base
  modified_base (12)..(12): 2'-hydroxy corresponding base
  modified_base (13)..(13): 2'-hydroxy corresponding base
  modified_base (14)..(14): 2'-hydroxy corresponding base
  modified_base (15)..(15): 2'-hydroxy corresponding base
  modified_base (16)..(16): 2'-hydroxy corresponding base
  modified_base (17)..(17): 2'-hydroxy corresponding base
  modified_base (18)..(18): 2'-hydroxy corresponding base
  modified_base (19)..(19): 2'-hydroxy corresponding base
  modified_base (20)..(20): deoxythymidine
  modified_base (21)..(21): deoxythymidine
ggaacugagccagaaacgctt

SEQ ID NO: 1060 - DNA, 21 bp, Artificial Sequence
  Description of Artificial Sequence: Synthetic oligonucleotide
  Description of Combined DNA/RNA Molecule: Synthetic oligonucleotide
  siRNAs to PCSK9
  modified_base (1)..(1): 2'-hydroxy corresponding base
  modified_base (2)..(2): 2'-hydroxy corresponding base
  modified_base (3)..(3): 2'-hydroxy corresponding base
  modified_base (4)..(4): 2'-hydroxy corresponding base
  modified_base (5)..(5): 2'-hydroxy corresponding base
  modified_base (6)..(6): 2'-hydroxy corresponding base
  modified_base (7)..(7): 2'-hydroxy corresponding base
  modified_base (8)..(8): 2'-hydroxy corresponding base
  modified_base (9)..(9): 2'-hydroxy corresponding base
  modified_base (10)..(10): 2'-hydroxy corresponding base
  modified_base (11)..(11): 2'-hydroxy corresponding base
  modified_base (12)..(12): 2'-hydroxy corresponding base
  modified_base (13)..(13): 2'-hydroxy corresponding base
  modified_base (14)..(14): 2'-hydroxy corresponding base
  modified_base (15)..(15): 2'-hydroxy corresponding base
  modified_base (16)..(16): 2'-hydroxy corresponding base
  modified_base (17)..(17): 2'-hydroxy corresponding base
  modified_base (18)..(18): 2'-hydroxy corresponding base
  modified_base (19)..(19): 2'-hydroxy corresponding base
  modified_base (20)..(20): deoxythymidine
  modified_base (21)..(21): deoxythymidine
gcguuucuggcucaguucctt

SEQ ID NO: 1061 - DNA, 21 bp, Artificial Sequence
  Description of Artificial Sequence: Synthetic oligonucleotide
  Description of Combined DNA/RNA Molecule: Synthetic oligonucleotide
  siRNAs to PCSK9
  modified_base (1)..(1): 2'-hydroxy corresponding base
  modified_base (2)..(2): 2'-hydroxy corresponding base
  modified_base (3)..(3): 2'-hydroxy corresponding base
  modified_base (4)..(4): 2'-hydroxy corresponding base
  modified_base (5)..(5): 2'-hydroxy corresponding base
  modified_base (6)..(6): 2'-hydroxy corresponding base
  modified_base (7)..(7): 2'-hydroxy corresponding base
  modified_base (8)..(8): 2'-hydroxy corresponding base
  modified_base (9)..(9): 2'-hydroxy corresponding base
  modified_base (10)..(10): 2'-hydroxy corresponding base
  modified_base (11)..(11): 2'-hydroxy corresponding base
  modified_base (12)..(12): 2'-hydroxy corresponding base
  modified_base (13)..(13): 2'-hydroxy corresponding base
  modified_base (14)..(14): 2'-hydroxy corresponding base
  modified_base (15)..(15): 2'-hydroxy corresponding base
  modified_base (16)..(16): 2'-hydroxy corresponding base
  modified_base (17)..(17): 2'-hydroxy corresponding base
  modified_base (18)..(18): 2'-hydroxy corresponding base
  modified_base (19)..(19): 2'-hydroxy corresponding base
  modified_base (20)..(20): deoxythymidine
  modified_base (21)..(21): deoxythymidine
gaacugagccagaaacgcatt

SEQ ID NO: 1062 - DNA, 21 bp, Artificial Sequence
  Description of Artificial Sequence: Synthetic oligonucleotide
  Description of Combined DNA/RNA Molecule: Synthetic oligonucleotide
  siRNAs to PCSK9
  modified_base (1)..(1): 2'-hydroxy corresponding base
  modified_base (2)..(2): 2'-hydroxy corresponding base
  modified_base (3)..(3): 2'-hydroxy corresponding base
  modified_base (4)..(4): 2'-hydroxy corresponding base
  modified_base (5)..(5): 2'-hydroxy corresponding base
  modified_base (6)..(6): 2'-hydroxy corresponding base
  modified_base (7)..(7): 2'-hydroxy corresponding base
  modified_base (8)..(8): 2'-hydroxy corresponding base
  modified_base (9)..(9): 2'-hydroxy corresponding base
  modified_base (10)..(10): 2'-hydroxy corresponding base
  modified_base (11)..(11): 2'-hydroxy corresponding base
  modified_base (12)..(12): 2'-hydroxy corresponding base
  modified_base (13)..(13): 2'-hydroxy corresponding base
  modified_base (14)..(14): 2'-hydroxy corresponding base
  modified_base (15)..(15): 2'-hydroxy corresponding base
  modified_base (16)..(16): 2'-hydroxy corresponding base
  modified_base (17)..(17): 2'-hydroxy corresponding base
  modified_base (18)..(18): 2'-hydroxy corresponding base
  modified_base (19)..(19): 2'-hydroxy corresponding base
  modified_base (20)..(20): deoxythymidine
  modified_base (21)..(21): deoxythymidine
ugcguuucuggcucaguuctt

SEQ ID NO: 1063 - DNA, 21 bp, Artificial Sequence
  Description of Artificial Sequence: Synthetic oligonucleotide
  Description of Combined DNA/RNA Molecule: Synthetic oligonucleotide
  siRNAs to PCSK9
  modified_base (1)..(1): 2'-hydroxy corresponding base
  modified_base (2)..(2): 2'-hydroxy corresponding base
  modified_base (3)..(3): 2'-hydroxy corresponding base
  modified_base (4)..(4): 2'-hydroxy corresponding base
  modified_base (5)..(5): 2'-hydroxy corresponding base
  modified_base (6)..(6): 2'-hydroxy corresponding base
  modified_base (7)..(7): 2'-hydroxy corresponding base
  modified_base (8)..(8): 2'-hydroxy corresponding base
  modified_base (9)..(9): 2'-hydroxy corresponding base
  modified_base (10)..(10): 2'-hydroxy corresponding base
  modified_base (11)..(11): 2'-hydroxy corresponding base
  modified_base (12)..(12): 2'-hydroxy corresponding base
  modified_base (13)..(13): 2'-hydroxy corresponding base
  modified_base (14)..(14): 2'-hydroxy corresponding base
  modified_base (15)..(15): 2'-hydroxy corresponding base
  modified_base (16)..(16): 2'-hydroxy corresponding base
  modified_base (17)..(17): 2'-hydroxy corresponding base
  modified_base (18)..(18): 2'-hydroxy corresponding base
  modified_base (19)..(19): 2'-hydroxy corresponding base
  modified_base (20)..(20): deoxythymidine
  modified_base (21)..(21): deoxythymidine
aacugagccagaaacgcagtt

SEQ ID NO: 1064 - DNA, 21 bp, Artificial Sequence
  Description of Artificial Sequence: Synthetic oligonucleotide
  Description of Combined DNA/RNA Molecule: Synthetic oligonucleotide
  siRNAs to PCSK9
  modified_base (1)..(1): 2'-hydroxy corresponding base
  modified_base (2)..(2): 2'-hydroxy corresponding base
  modified_base (3)..(3): 2'-hydroxy corresponding base
  modified_base (4)..(4): 2'-hydroxy corresponding base
  modified_base (5)..(5): 2'-hydroxy corresponding base
  modified_base (6)..(6): 2'-hydroxy corresponding base
  modified_base (7)..(7): 2'-hydroxy corresponding base
  modified_base (8)..(8): 2'-hydroxy corresponding base
  modified_base (9)..(9): 2'-hydroxy corresponding base
  modified_base (10)..(10): 2'-hydroxy corresponding base
  modified_base (11)..(11): 2'-hydroxy corresponding base
  modified_base (12)..(12): 2'-hydroxy corresponding base
  modified_base (13)..(13): 2'-hydroxy corresponding base
  modified_base (14)..(14): 2'-hydroxy corresponding base
  modified_base (15)..(15): 2'-hydroxy corresponding base
  modified_base (16)..(16): 2'-hydroxy corresponding base
  modified_base (17)..(17): 2'-hydroxy corresponding base
  modified_base (18)..(18): 2'-hydroxy corresponding base
  modified_base (19)..(19): 2'-hydroxy corresponding base
  modified_base (20)..(20): deoxythymidine
  modified_base (21)..(21): deoxythymidine
cugcguuucuggcucaguutt

SEQ ID NO: 1065 - DNA, 21 bp, Artificial Sequence
  Description of Artificial Sequence: Synthetic oligonucleotide
  Description of Combined DNA/RNA Molecule: Synthetic oligonucleotide
  siRNAs to PCSK9
  modified_base (1)..(1): 2'-hydroxy corresponding base
  modified_base (2)..(2): 2'-hydroxy corresponding base
  modified_base (3)..(3): 2'-hydroxy corresponding base
  modified_base (4)..(4): 2'-hydroxy corresponding base
  modified_base (5)..(5): 2'-hydroxy corresponding base
  modified_base (6)..(6): 2'-hydroxy corresponding base
  modified_base (7)..(7): 2'-hydroxy corresponding base
  modified_base (8)..(8): 2'-hydroxy corresponding base
  modified_base (9)..(9): 2'-hydroxy corresponding base
  modified_base (10)..(10): 2'-hydroxy corresponding base
  modified_base (11)..(11): 2'-hydroxy corresponding base
  modified_base (12)..(12): 2'-hydroxy corresponding base
  modified_base (13)..(13): 2'-hydroxy corresponding base
  modified_base (14)..(14): 2'-hydroxy corresponding base
  modified_base (15)..(15): 2'-hydroxy corresponding base
  modified_base (16)..(16): 2'-hydroxy corresponding base
  modified_base (17)..(17): 2'-hydroxy corresponding base
  modified_base (18)..(18): 2'-hydroxy corresponding base
  modified_base (19)..(19): 2'-hydroxy corresponding base
  modified_base (20)..(20): deoxythymidine
  modified_base (21)..(21): deoxythymidine
ugagccagaaacgcagauutt

SEQ ID NO: 1066 - DNA, 21 bp, Artificial Sequence
  Description of Artificial Sequence: Synthetic oligonucleotide
  Description of Combined DNA/RNA Molecule: Synthetic oligonucleotide
  siRNAs to PCSK9
  modified_base (1)..(1): 2'-hydroxy corresponding base
  modified_base (2)..(2): 2'-hydroxy corresponding base
  modified_base (3)..(3): 2'-hydroxy corresponding base
  modified_base (4)..(4): 2'-hydroxy corresponding base
  modified_base (5)..(5): 2'-hydroxy corresponding base
  modified_base (6)..(6): 2'-hydroxy corresponding base
  modified_base (7)..(7): 2'-hydroxy corresponding base
  modified_base (8)..(8): 2'-hydroxy corresponding base
  modified_base (9)..(9): 2'-hydroxy corresponding base
  modified_base (10)..(10): 2'-hydroxy corresponding base
  modified_base (11)..(11): 2'-hydroxy corresponding base
  modified_base (12)..(12): 2'-hydroxy corresponding base
  modified_base (13)..(13): 2'-hydroxy corresponding base
  modified_base (14)..(14): 2'-hydroxy corresponding base
  modified_base (15)..(15): 2'-hydroxy corresponding base
  modified_base (16)..(16): 2'-hydroxy corresponding base
  modified_base (17)..(17): 2'-hydroxy corresponding base
  modified_base (18)..(18): 2'-hydroxy corresponding base
  modified_base (19)..(19): 2'-hydroxy corresponding base
  modified_base (20)..(20): deoxythymidine
  modified_base (21)..(21): deoxythymidine
aaucugcguuucuggcucatt

SEQ ID NO: 1067 - DNA, 21 bp, Artificial Sequence
  Description of Artificial Sequence: Synthetic oligonucleotide
  Description of Combined DNA/RNA Molecule: Synthetic oligonucleotide
  siRNAs to PCSK9
  modified_base (1)..(1): 2'-hydroxy corresponding base
  modified_base (2)..(2): 2'-hydroxy corresponding base
  modified_base (3)..(3): 2'-hydroxy corresponding base
  modified_base (4)..(4): 2'-hydroxy corresponding base
  modified_base (5)..(5): 2'-hydroxy corresponding base
  modified_base (6)..(6): 2'-hydroxy corresponding base
  modified_base (7)..(7): 2'-hydroxy corresponding base
  modified_base (8)..(8): 2'-hydroxy corresponding base
  modified_base (9)..(9): 2'-hydroxy corresponding base
  modified_base (10)..(10): 2'-hydroxy corresponding base
  modified_base (11)..(11): 2'-hydroxy corresponding base
  modified_base (12)..(12): 2'-hydroxy corresponding base
  modified_base (13)..(13): 2'-hydroxy corresponding base
  modified_base (14)..(14): 2'-hydroxy corresponding base
  modified_base (15)..(15): 2'-hydroxy corresponding base
  modified_base (16)..(16): 2'-hydroxy corresponding base
  modified_base (17)..(17): 2'-hydroxy corresponding base
  modified_base (18)..(18): 2'-hydroxy corresponding base
  modified_base (19)..(19): 2'-hydroxy corresponding base
  modified_base (20)..(20): deoxythymidine
  modified_base (21)..(21): deoxythymidine
agaaacgcagauugggcugtt

SEQ ID NO: 1068 - DNA, 21 bp, Artificial Sequence
  Description of Artificial Sequence: Synthetic oligonucleotide
  Description of Combined DNA/RNA Molecule: Synthetic oligonucleotide
  siRNAs to PCSK9
  modified_base (1)..(1): 2'-hydroxy corresponding base
  modified_base (2)..(2): 2'-hydroxy corresponding base
  modified_base (3)..(3): 2'-hydroxy corresponding base
  modified_base (4)..(4): 2'-hydroxy corresponding base
  modified_base (5)..(5): 2'-hydroxy corresponding base
  modified_base (6)..(6): 2'-hydroxy corresponding base
  modified_base (7)..(7): 2'-hydroxy corresponding base
  modified_base (8)..(8): 2'-hydroxy corresponding base
  modified_base (9)..(9): 2'-hydroxy corresponding base
  modified_base (10)..(10): 2'-hydroxy corresponding base
  modified_base (11)..(11): 2'-hydroxy corresponding base
  modified_base (12)..(12): 2'-hydroxy corresponding base
  modified_base (13)..(13): 2'-hydroxy corresponding base
  modified_base (14)..(14): 2'-hydroxy corresponding base
  modified_base (15)..(15): 2'-hydroxy corresponding base
  modified_base (16)..(16): 2'-hydroxy corresponding base
  modified_base (17)..(17): 2'-hydroxy corresponding base
  modified_base (18)..(18): 2'-hydroxy corresponding base
  modified_base (19)..(19): 2'-hydroxy corresponding base
  modified_base (20)..(20): deoxythymidine
  modified_base (21)..(21): deoxythymidine
cagcccaaucugcguuucutt

SEQ ID NO: 1069 - DNA, 21 bp, Artificial Sequence
  Description of Artificial Sequence: Synthetic oligonucleotide
  Description of Combined DNA/RNA Molecule: Synthetic oligonucleotide
  siRNAs to PCSK9
  modified_base (1)..(1): 2'-hydroxy corresponding base
  modified_base (2)..(2): 2'-hydroxy corresponding base
  modified_base (3)..(3): 2'-hydroxy corresponding base
  modified_base (4)..(4): 2'-hydroxy corresponding base
  modified_base (5)..(5): 2'-hydroxy corresponding base
  modified_base (6)..(6): 2'-hydroxy corresponding base
  modified_base (7)..(7): 2'-hydroxy corresponding base
  modified_base (8)..(8): 2'-hydroxy corresponding base
  modified_base (9)..(9): 2'-hydroxy corresponding base
  modified_base (10)..(10): 2'-hydroxy corresponding base
  modified_base (11)..(11): 2'-hydroxy corresponding base
  modified_base (12)..(12): 2'-hydroxy corresponding base
  modified_base (13)..(13): 2'-hydroxy corresponding base
  modified_base (14)..(14): 2'-hydroxy corresponding base
  modified_base (15)..(15): 2'-hydroxy corresponding base
  modified_base (16)..(16): 2'-hydroxy corresponding base
  modified_base (17)..(17): 2'-hydroxy corresponding base
  modified_base (18)..(18): 2'-hydroxy corresponding base
  modified_base (19)..(19): 2'-hydroxy corresponding base
  modified_base (20)..(20): deoxythymidine
  modified_base (21)..(21): deoxythymidine
aacgcagauugggcuggcutt

SEQ ID NO: 1070 - DNA, 21 bp, Artificial Sequence
  Description of Artificial Sequence: Synthetic oligonucleotide
  Description of Combined DNA/RNA Molecule: Synthetic oligonucleotide
  siRNAs to PCSK9
  modified_base (1)..(1): 2'-hydroxy corresponding base
  modified_base (2)..(2): 2'-hydroxy corresponding base
  modified_base (3)..(3): 2'-hydroxy corresponding base
  modified_base (4)..(4): 2'-hydroxy corresponding base
  modified_base (5)..(5): 2'-hydroxy corresponding base
  modified_base (6)..(6): 2'-hydroxy corresponding base
  modified_base (7)..(7): 2'-hydroxy corresponding base
  modified_base (8)..(8): 2'-hydroxy corresponding base
  modified_base (9)..(9): 2'-hydroxy corresponding base
  modified_base (10)..(10): 2'-hydroxy corresponding base
  modified_base (11)..(11): 2'-hydroxy corresponding base
  modified_base (12)..(12): 2'-hydroxy corresponding base
  modified_base (13)..(13): 2'-hydroxy corresponding base
  modified_base (14)..(14): 2'-hydroxy corresponding base
  modified_base (15)..(15): 2'-hydroxy corresponding base
  modified_base (16)..(16): 2'-hydroxy corresponding base
  modified_base (17)..(17): 2'-hydroxy corresponding base
  modified_base (18)..(18): 2'-hydroxy corresponding base
  modified_base (19)..(19): 2'-hydroxy corresponding base
  modified_base (20)..(20): deoxythymidine
  modified_base (21)..(21): deoxythymidine
agccagcccaaucugcguutt

SEQ ID NO: 1071 - DNA, 21 bp, Artificial Sequence
  Description of Artificial Sequence: Synthetic oligonucleotide
  Description of Combined DNA/RNA Molecule: Synthetic oligonucleotide
  siRNAs to PCSK9
  modified_base (1)..(1): 2'-hydroxy corresponding base
  modified_base (2)..(2): 2'-hydroxy corresponding base
  modified_base (3)..(3): 2'-hydroxy corresponding base
  modified_base (4)..(4): 2'-hydroxy corresponding base
  modified_base (5)..(5): 2'-hydroxy corresponding base
  modified_base (6)..(6): 2'-hydroxy corresponding base
  modified_base (7)..(7): 2'-hydroxy corresponding base
  modified_base (8)..(8): 2'-hydroxy corresponding base
  modified_base (9)..(9): 2'-hydroxy corresponding base
  modified_base (10)..(10): 2'-hydroxy corresponding base
  modified_base (11)..(11): 2'-hydroxy corresponding base
  modified_base (12)..(12): 2'-hydroxy corresponding base
  modified_base (13)..(13): 2'-hydroxy corresponding base
  modified_base (14)..(14): 2'-hydroxy corresponding base
  modified_base (15)..(15): 2'-hydroxy corresponding base
  modified_base (16)..(16): 2'-hydroxy corresponding base
  modified_base (17)..(17): 2'-hydroxy corresponding base
  modified_base (18)..(18): 2'-hydroxy corresponding base
  modified_base (19)..(19): 2'-hydroxy corresponding base
  modified_base (20)..(20): deoxythymidine
  modified_base (21)..(21): 5'-thio thymidine
agccaagccucuucuuacutt

SEQ ID NO: 1072 - DNA, 21 bp, Artificial Sequence
  Description of Artificial Sequence: Synthetic oligonucleotide
  Description of Combined DNA/RNA Molecule: Synthetic oligonucleotide
  siRNAs to PCSK9
  modified_base (1)..(1): 2'-hydroxy corresponding base
  modified_base (2)..(2): 2'-hydroxy corresponding base
  modified_base (3)..(3): 2'-hydroxy corresponding base
  modified_base (4)..(4): 2'-hydroxy corresponding base
  modified_base (5)..(5): 2'-hydroxy corresponding base
  modified_base (6)..(6): 2'-hydroxy corresponding base
  modified_base (7)..(7): 2'-hydroxy corresponding base
  modified_base (8)..(8): 2'-hydroxy corresponding base
  modified_base (9)..(9): 2'-hydroxy corresponding base
  modified_base (10)..(10): 2'-hydroxy corresponding base
  modified_base (11)..(11): 2'-hydroxy corresponding base
  modified_base (12)..(12): 2'-hydroxy corresponding base
  modified_base (13)..(13): 2'-hydroxy corresponding base
  modified_base (14)..(14): 2'-hydroxy corresponding base
  modified_base (15)..(15): 2'-hydroxy corresponding base
  modified_base (16)..(16): 2'-hydroxy corresponding base
  modified_base (17)..(17): 2'-hydroxy corresponding base
  modified_base (18)..(18): 2'-hydroxy corresponding base
  modified_base (19)..(19): 2'-hydroxy corresponding base
  modified_base (20)..(20): deoxythymidine
  modified_base (21)..(21): 5'-thio thymidine
aguaagaagaggcuuggcutt

SEQ ID NO: 1073 - DNA, 21 bp, Artificial Sequence
  Description of Artificial Sequence: Synthetic oligonucleotide
  Description of Combined DNA/RNA Molecule: Synthetic oligonucleotide
  siRNAs to PCSK9
  modified_base (1)..(1): 2'-hydroxy corresponding base
  modified_base (2)..(2): 2'-hydroxy corresponding base
  modified_base (3)..(3): 2'-O-methyl corresponding base
  modified_base (4)..(4): 2'-O-methyl corresponding base
  modified_base (5)..(5): 2'-hydroxy corresponding base
  modified_base (6)..(6): 2'-hydroxy corresponding base
  modified_base (7)..(7): 2'-hydroxy corresponding base
  modified_base (8)..(8): 2'-O-methyl corresponding base
  modified_base (9)..(9): 2'-O-methyl corresponding base
  modified_base (10)..(10): 2'-O-methyl corresponding base
  modified_base (11)..(11): 2'-O-methyl corresponding base
  modified_base (12)..(12): 2'-O-methyl corresponding base
  modified_base (13)..(13): 2'-O-methyl corresponding base
  modified_base (14)..(14): 2'-O-methyl corresponding base
  modified_base (15)..(15): 2'-O-methyl corresponding base
  modified_base (16)..(16): 2'-O-methyl corresponding base
  modified_base (17)..(17): 2'-hydroxy corresponding base
  modified_base (18)..(18): 2'-O-methyl corresponding base
  modified_base (19)..(19): 2'-O-methyl corresponding base
  modified_base (20)..(20): deoxythymidine
  modified_base (21)..(21): 5'-thio thymidine
agccaagccucuucuuacutt

SEQ ID NO: 1074 - DNA, 21 bp, Artificial Sequence
  Description of Artificial Sequence: Synthetic oligonucleotide
  Description of Combined DNA/RNA Molecule: Synthetic oligonucleotide
  siRNAs to PCSK9
  modified_base (1)..(1): 2'-hydroxy corresponding base
  modified_base (2)..(2): 2'-hydroxy corresponding base
  modified_base (3)..(3): 2'-O-methyl corresponding base
  modified_base (4)..(4): 2'-hydroxy corresponding base
  modified_base (5)..(5): 2'-hydroxy corresponding base
  modified_base (6)..(6): 2'-hydroxy corresponding base
  modified_base (7)..(7): 2'-hydroxy corresponding base
  modified_base (8)..(8): 2'-hydroxy corresponding base
  modified_base (9)..(9): 2'-hydroxy corresponding base
  modified_base (10)..(10): 2'-hydroxy corresponding base
  modified_base (11)..(11): 2'-hydroxy corresponding base
  modified_base (12)..(12): 2'-hydroxy corresponding base
  modified_base (13)..(13): 2'-hydroxy corresponding base
  modified_base (14)..(14): 2'-hydroxy corresponding base
  modified_base (15)..(15): 2'-hydroxy corresponding base
  modified_base (16)..(16): 2'-hydroxy corresponding base
  modified_base (17)..(17): 2'-hydroxy corresponding base
  modified_base (18)..(18): 2'-hydroxy corresponding base
  modified_base (19)..(19): 2'-hydroxy corresponding base
  modified_base (20)..(20): deoxythymidine
  modified_base (21)..(21): 5'-thio thymidine
aguaagaagaggcuuggcutt

SEQ ID NO: 1075 - DNA, 21 bp, Artificial Sequence
  Description of Artificial Sequence: Synthetic oligonucleotide
  Description of Combined DNA/RNA Molecule: Synthetic oligonucleotide
  siRNAs to PCSK9
  modified_base (1)..(1): 2'-deoxy-2'-fluoro corresponding base
  modified_base (2)..(2): 2'-O-methyl corresponding base
  modified_base (3)..(3): 2'-deoxy-2'-fluoro corresponding base
  modified_base (4)..(4): 2'-O-methyl corresponding base
  modified_base (5)..(5): 2'-deoxy-2'-fluoro corresponding base
  modified_base (6)..(6): 2'-O-methyl corresponding base
  modified_base (7)..(7): 2'-deoxy-2'-fluoro corresponding base
  modified_base (8)..(8): 2'-O-methyl corresponding base
  modified_base (9)..(9): 2'-deoxy-2'-fluoro corresponding base
  modified_base (10)..(10): 2'-O-methyl corresponding base
  modified_base (11)..(11): 2'-deoxy-2'-fluoro corresponding base
  modified_base (12)..(12): 2'-O-methyl corresponding base
  modified_base (13)..(13): 2'-deoxy-2'-fluoro corresponding base
  modified_base (14)..(14): 2'-O-methyl corresponding base
  modified_base (15)..(15): 2'-deoxy-2'-fluoro corresponding base
  modified_base (16)..(16): 2'-O-methyl corresponding base
  modified_base (17)..(17): 2'-deoxy-2'-fluoro corresponding base
  modified_base (18)..(18): 2'-O-methyl corresponding base
  modified_base (19)..(19): 2'-deoxy-2'-fluoro corresponding base
  modified_base (20)..(20): deoxythymidine
  modified_base (21)..(21): 5'-thio thymidine
agccaagccucuucuuacutt

SEQ ID NO: 1076 - DNA, 21 bp, Artificial Sequence
  Description of Artificial Sequence: Synthetic oligonucleotide
  Description of Combined DNA/RNA Molecule: Synthetic oligonucleotide
  siRNAs to PCSK9
  modified_base (1)..(1): 2'-O-methyl corresponding base
  modified_base (2)..(2): 2'-deoxy-2'-fluoro corresponding base
  modified_base (3)..(3): 2'-O-methyl corresponding base
  modified_base (4)..(4): 2'-deoxy-2'-fluoro corresponding base
  modified_base (5)..(5): 2'-O-methyl corresponding base
  modified_base (6)..(6): 2'-deoxy-2'-fluoro corresponding base
  modified_base (7)..(7): 2'-O-methyl corresponding base
  modified_base (8)..(8): 2'-deoxy-2'-fluoro corresponding base
  modified_base (9)..(9): 2'-O-methyl corresponding base
  modified_base (10)..(10): 2'-deoxy-2'-fluoro corresponding base
  modified_base (11)..(11): 2'-O-methyl corresponding base
  modified_base (12)..(12): 2'-deoxy-2'-fluoro corresponding base
  modified_base (13)..(13): 2'-O-methyl corresponding base
  modified_base (14)..(14): 2'-deoxy-2'-fluoro corresponding base
  modified_base (15)..(15): 2'-O-methyl corresponding base
  modified_base (16)..(16): 2'-deoxy-2'-fluoro corresponding base
  modified_base (17)..(17): 2'-O-methyl corresponding base
  modified_base (18)..(18): 2'-deoxy-2'-fluoro corresponding base
  modified_base (19)..(19): 2'-O-methyl corresponding base
  modified_base (20)..(20): deoxythymidine
  modified_base (21)..(21): 5'-thio thymidine
aguaagaagaggcuuggcutt

SEQ ID NO: 1077 - DNA, 21 bp, Artificial Sequence
  Description of Artificial Sequence: Synthetic oligonucleotide
  Description of Combined DNA/RNA Molecule: Synthetic oligonucleotide
  siRNAs to PCSK9
  modified_base (1)..(1): 2'-hydroxy corresponding base
  modified_base (2)..(2): 2'-hydroxy corresponding base
  modified_base (3)..(3): 2'-deoxy-2'-fluoro corresponding base
  modified_base (4)..(4): 2'-deoxy-2'-fluoro corresponding base
  modified_base (5)..(5): 2'-hydroxy corresponding base
  modified_base (6)..(6): 2'-hydroxy corresponding base
  modified_base (7)..(7): 2'-hydroxy corresponding base
  modified_base (8)..(8): 2'-deoxy-2'-fluoro corresponding base
  modified_base (9)..(9): 2'-deoxy-2'-fluoro corresponding base
  modified_base (10)..(10): 2'-deoxy-2'-fluoro corresponding base
  modified_base (11)..(11): 2'-deoxy-2'-fluoro corresponding base
  modified_base (12)..(12): 2'-deoxy-2'-fluoro corresponding base
  modified_base (13)..(13): 2'-deoxy-2'-fluoro corresponding base
  modified_base (14)..(14): 2'-deoxy-2'-fluoro corresponding base
  modified_base (15)..(15): 2'-deoxy-2'-fluoro corresponding base
  modified_base (16)..(16): 2'-deoxy-2'-fluoro corresponding base
  modified_base (17)..(17): 2'-hydroxy corresponding base
  modified_base (18)..(18): 2'-deoxy-2'-fluoro corresponding base
  modified_base (19)..(19): 2'-deoxy-2'-fluoro corresponding base
  modified_base (20)..(20): deoxythymidine
  modified_base (21)..(21): 5'-thio thymidine
agccaagccucuucuuacutt

SEQ ID NO: 1078 - DNA, 21 bp, Artificial Sequence
  Description of Artificial Sequence: Synthetic oligonucleotide
  Description of Combined DNA/RNA Molecule: Synthetic oligonucleotide
  siRNAs to PCSK9
  modified_base (1)..(1): 2'-hydroxy corresponding base
  modified_base (2)..(2): 2'-hydroxy corresponding base
  modified_base (3)..(3): 2'-deoxy-2'-fluoro corresponding base
  modified_base (4)..(4): 2'-hydroxy corresponding base
  modified_base (5)..(5): 2'-hydroxy corresponding base
  modified_base (6)..(6): 2'-hydroxy corresponding base
  modified_base (7)..(7): 2'-hydroxy corresponding base
  modified_base (8)..(8): 2'-hydroxy corresponding base
  modified_base (9)..(9): 2'-hydroxy corresponding base
  modified_base (10)..(10): 2'-hydroxy corresponding base
  modified_base (11)..(11): 2'-hydroxy corresponding base
  modified_base (12)..(12): 2'-hydroxy corresponding base
  modified_base (13)..(13): 2'-deoxy-2'-fluoro corresponding base
  modified_base (14)..(14): 2'-deoxy-2'-fluoro corresponding base
  modified_base (15)..(15): 2'-deoxy-2'-fluoro corresponding base
  modified_base (16)..(16): 2'-hydroxy corresponding base
  modified_base (17)..(17): 2'-hydroxy corresponding base
  modified_base (18)..(18): 2'-deoxy-2'-fluoro corresponding base
  modified_base (19)..(19): 2'-deoxy-2'-fluoro corresponding base
  modified_base (20)..(20): deoxythymidine
  modified_base (21)..(21): 5'-thio thymidine
aguaagaagaggcuuggcutt

SEQ ID NO: 1079 - DNA, 21 bp, Artificial Sequence
  Description of Artificial Sequence: Synthetic oligonucleotide
  Description of Combined DNA/RNA Molecule: Synthetic oligonucleotide
  siRNAs to PCSK9
  modified_base (1)..(1): 2'-hydroxy corresponding base
  modified_base (2)..(2): 2'-O-methyl corresponding base
  modified_base (3)..(3): 2'-hydroxy corresponding base
  modified_base (4)..(4): 2'-O-methyl corresponding base
  modified_base (5)..(5): 2'-hydroxy corresponding base
  modified_base (6)..(6): 2'-O-methyl corresponding base
  modified_base (7)..(7): 2'-hydroxy corresponding base
  modified_base (8)..(8): 2'-O-methyl corresponding base
  modified_base (9)..(9): 2'-hydroxy corresponding base
  modified_base (10)..(10): 2'-O-methyl corresponding base
  modified_base (11)..(11): 2'-hydroxy corresponding base
  modified_base (12)..(12): 2'-O-methyl corresponding base
  modified_base (13)..(13): 2'-hydroxy corresponding base
  modified_base (14)..(14): 2'-O-methyl corresponding base
  modified_base (15)..(15): 2'-hydroxy corresponding base
  modified_base (16)..(16): 2'-O-methyl corresponding base
  modified_base (17)..(17): 2'-hydroxy corresponding base
  modified_base (18)..(18): 2'-O-methyl corresponding base
  modified_base (19)..(19): 2'-hydroxy corresponding base
  modified_base (20)..(20): deoxythymidine
  modified_base (21)..(21): 5'-thio thymidine
agccaagccucuucuuacutt

SEQ ID NO: 1080 - DNA, 21 bp, Artificial Sequence
  Description of Artificial Sequence: Synthetic oligonucleotide
  Description of Combined DNA/RNA Molecule: Synthetic oligonucleotide
  siRNAs to PCSK9
  modified_base (1)..(1): 2'-O-methyl corresponding base
  modified_base (2)..(2): 2'-deoxy-2'-fluoro corresponding base
  modified_base (3)..(3): 2'-O-methyl corresponding base
  modified_base (4)..(4): 2'-deoxy-2'-fluoro corresponding base
  modified_base (5)..(5): 2'-O-methyl corresponding base
  modified_base (6)..(6): 2'-deoxy-2'-fluoro corresponding base
  modified_base (7)..(7): 2'-O-methyl corresponding base
  modified_base (8)..(8): 2'-deoxy-2'-fluoro corresponding base
  modified_base (9)..(9): 2'-O-methyl corresponding base
  modified_base (10)..(10): 2'-deoxy-2'-fluoro corresponding base
  modified_base (11)..(11): 2'-O-methyl corresponding base
  modified_base (12)..(12): 2'-deoxy-2'-fluoro corresponding base
  modified_base (13)..(13): 2'-O-methyl corresponding base
  modified_base (14)..(14): 2'-deoxy-2'-fluoro corresponding base
  modified_base (15)..(15): 2'-O-methyl corresponding base
  modified_base (16)..(16): 2'-deoxy-2'-fluoro corresponding base
  modified_base (17)..(17): 2'-O-methyl corresponding base
  modified_base (18)..(18): 2'-deoxy-2'-fluoro corresponding base
  modified_base (19)..(19): 2'-O-methyl corresponding base
  modified_base (20)..(20): deoxythymidine
  modified_base (21)..(21): 5'-thio thymidine
aguaagaagaggcuuggcutt

SEQ ID NO: 1081 - DNA, 21 bp, Artificial Sequence
  Description of Artificial Sequence: Synthetic oligonucleotide
  Description of Combined DNA/RNA Molecule: Synthetic oligonucleotide
  siRNAs to PCSK9
  modified_base (1)..(1): 2'-hydroxy corresponding base
  modified_base (2)..(2): 2'-O-methyl corresponding base
  modified_base (3)..(3): 2'-hydroxy corresponding base
  modified_base (4)..(4): 2'-O-methyl corresponding base
  modified_base (5)..(5): 2'-hydroxy corresponding base
  modified_base (6)..(6): 2'-O-methyl corresponding base
  modified_base (7)..(7): 2'-hydroxy corresponding base
  modified_base (8)..(8): 2'-O-methyl corresponding base
  modified_base (9)..(9): 2'-hydroxy corresponding base
  modified_base (10)..(10): 2'-O-methyl corresponding base
  modified_base (11)..(11): 2'-hydroxy corresponding base
  modified_base (12)..(12): 2'-O-methyl corresponding base
  modified_base (13)..(13): 2'-hydroxy corresponding base
  modified_base (14)..(14): 2'-O-methyl corresponding base
  modified_base (15)..(15): 2'-hydroxy corresponding base
  modified_base (16)..(16): 2'-O-methyl corresponding base
  modified_base (17)..(17): 2'-hydroxy corresponding base
  modified_base (18)..(18): 2'-O-methyl corresponding base
  modified_base (19)..(19): 2'-hydroxy corresponding base
  modified_base (20)..(20): deoxythymidine
  modified_base (21)..(21): 5'-thio thymidine
agccaagccucuucuuacutt

SEQ ID NO: 1082 - DNA, 21 bp, Artificial Sequence
  Description of Artificial Sequence: Synthetic oligonucleotide
  Description of Combined DNA/RNA Molecule: Synthetic oligonucleotide
  siRNAs to PCSK9
  modified_base (1)..(1): 2'-hydroxy corresponding base
  modified_base (2)..(2): 2'-hydroxy corresponding base
  modified_base (3)..(3): 2'-deoxy-2'-fluoro corresponding base
  modified_base (4)..(4): 2'-hydroxy corresponding base
  modified_base (5)..(5): 2'-hydroxy corresponding base
  modified_base (6)..(6): 2'-hydroxy corresponding base
  modified_base (7)..(7): 2'-hydroxy corresponding base
  modified_base (8)..(8): 2'-hydroxy corresponding base
  modified_base (9)..(9): 2'-hydroxy corresponding base
  modified_base (10)..(10): 2'-hydroxy corresponding base
  modified_base (11)..(11): 2'-hydroxy corresponding base
  modified_base (12)..(12): 2'-hydroxy corresponding base
  modified_base (13)..(13): 2'-deoxy-2'-fluoro corresponding base
  modified_base (14)..(14): 2'-deoxy-2'-fluoro corresponding base
  modified_base (15)..(15): 2'-deoxy-2'-fluoro corresponding base
  modified_base (16)..(16): 2'-hydroxy corresponding base
  modified_base (17)..(17): 2'-hydroxy corresponding base
  modified_base (18)..(18): 2'-deoxy-2'-fluoro corresponding base
  modified_base (19)..(19): 2'-deoxy-2'-fluoro corresponding base
  modified_base (20)..(20): deoxythymidine
  modified_base (21)..(21): 5'-thio thymidine
aguaagaagaggcuuggcutt

SEQ ID NO: 1083 - DNA, 21 bp, Artificial Sequence
  Description of Artificial Sequence: Synthetic oligonucleotide
  Description of Combined DNA/RNA Molecule: Synthetic oligonucleotide
  siRNAs to PCSK9
  modified_base (1)..(1): 2'-deoxy-2'-fluoro corresponding base
  modified_base (2)..(2): 2'-O-methyl corresponding base
  modified_base (3)..(3): 2'-deoxy-2'-fluoro corresponding base
  modified_base (4)..(4): 2'-O-methyl corresponding base
  modified_base (5)..(5): 2'-deoxy-2'-fluoro corresponding base
  modified_base (6)..(6): 2'-O-methyl corresponding base
  modified_base (7)..(7): 2'-deoxy-2'-fluoro corresponding base
  modified_base (8)..(8): 2'-O-methyl corresponding base
  modified_base (9)..(9): 2'-deoxy-2'-fluoro corresponding base
  modified_base (10)..(10): 2'-O-methyl corresponding base
  modified_base (11)..(11): 2'-deoxy-2'-fluoro corresponding base
  modified_base (12)..(12): 2'-O-methyl corresponding base
  modified_base (13)..(13): 2'-deoxy-2'-fluoro corresponding base
  modified_base (14)..(14): 2'-O-methyl corresponding base
  modified_base (15)..(15): 2'-deoxy-2'-fluoro corresponding base
  modified_base (16)..(16): 2'-O-methyl corresponding base
  modified_base (17)..(17): 2'-deoxy-2'-fluoro corresponding base
  modified_base (18)..(18): 2'-O-methyl corresponding base
  modified_base (19)..(19): 2'-deoxy-2'-fluoro corresponding base
  modified_base (20)..(20): deoxythymidine
  modified_base (21)..(21): 5'-thio thymidine
agccaagccucuucuuacutt

SEQ ID NO: 1084 - DNA, 21 bp, Artificial Sequence
  Description of Artificial Sequence: Synthetic oligonucleotide
  Description of Combined DNA/RNA Molecule: Synthetic oligonucleotide
  siRNAs to PCSK9
  modified_base (1)..(1): 2'-hydroxy corresponding base
  modified_base (2)..(2): 2'-hydroxy corresponding base
  modified_base (3)..(3): 2'-hydroxy corresponding base
  modified_base (4)..(4): 2'-hydroxy corresponding base
  modified_base (5)..(5): 2'-hydroxy corresponding base
  modified_base (6)..(6): 2'-O-methyl corresponding base
  modified_base (7)..(7): 2'-O-methyl corresponding base
  modified_base (8)..(8): 2'-hydroxy corresponding base
  modified_base (9)..(9): 2'-hydroxy corresponding base
  modified_base (10)..(10): 2'-O-methyl corresponding base
  modified_base (11)..(11): 2'-O-methyl corresponding base
  modified_base (12)..(12): 2'-hydroxy corresponding base
  modified_base (13)..(13): 2'-hydroxy corresponding base
  modified_base (14)..(14): 2'-hydroxy corresponding base
  modified_base (15)..(15): 2'-hydroxy corresponding base
  modified_base (16)..(16): 2'-hydroxy corresponding base
  modified_base (17)..(17): 2'-O-methyl corresponding base
  modified_base (18)..(18): 2'-O-methyl corresponding base
  modified_base (19)..(19): 2'-O-methyl corresponding base
  modified_base (20)..(20): deoxythymidine
  modified_base (21)..(21): 5'-thio thymidine
aguaagaagaggcuuggcutt

SEQ ID NO: 1085 - DNA, 21 bp, Artificial Sequence
  Description of Artificial Sequence: Synthetic oligonucleotide
  Description of Combined DNA/RNA Molecule: Synthetic oligonucleotide
  siRNAs to PCSK9
  modified_base (1)..(1): 2'-hydroxy corresponding base
  modified_base (2)..(2): 2'-hydroxy corresponding base
  modified_base (3)..(3): 2'-deoxy-2'-fluoro corresponding base
  modified_base (4)..(4): 2'-deoxy-2'-fluoro corresponding base
  modified_base (5)..(5): 2'-hydroxy corresponding base
  modified_base (6)..(6): 2'-hydroxy corresponding base
  modified_base (7)..(7): 2'-hydroxy corresponding base
  modified_base (8)..(8): 2'-deoxy-2'-fluoro corresponding base
  modified_base (9)..(9): 2'-deoxy-2'-fluoro corresponding base
  modified_base (10)..(10): 2'-deoxy-2'-fluoro corresponding base
  modified_base (11)..(11): 2'-deoxy-2'-fluoro corresponding base
  modified_base (12)..(12): 2'-deoxy-2'-fluoro corresponding base
  modified_base (13)..(13): 2'-deoxy-2'-fluoro corresponding base
  modified_base (14)..(14): 2'-deoxy-2'-fluoro corresponding base
  modified_base (15)..(15): 2'-deoxy-2'-fluoro corresponding base
  modified_base (16)..(16): 2'-deoxy-2'-fluoro corresponding base
  modified_base (17)..(17): 2'-hydroxy corresponding base
  modified_base (18)..(18): 2'-deoxy-2'-fluoro corresponding base
  modified_base (19)..(19): 2'-deoxy-2'-fluoro corresponding base
  modified_base (20)..(20): deoxythymidine
  modified_base (21)..(21): 5'-thio thymidine
agccaagccucuucuuacutt

SEQ ID NO: 1086 - DNA, 21 bp, Artificial Sequence
  Description of Artificial Sequence: Synthetic oligonucleotide
  Description of Combined DNA/RNA Molecule: Synthetic oligonucleotide
  siRNAs to PCSK9
  modified_base (1)..(1): 2'-hydroxy corresponding base
  modified_base (2)..(2): 2'-hydroxy corresponding base
  modified_base (3)..(3): 2'-hydroxy corresponding base
  modified_base (4)..(4): 2'-hydroxy corresponding base
  modified_base (5)..(5): 2'-hydroxy corresponding base
  modified_base (6)..(6): 2'-O-methyl corresponding base
  modified_base (7)..(7): 2'-O-methyl corresponding base
  modified_base (8)..(8): 2'-hydroxy corresponding base
  modified_base (9)..(9): 2'-hydroxy corresponding base
  modified_base (10)..(10): 2'-O-methyl corresponding base
  modified_base (11)..(11): 2'-O-methyl corresponding base
  modified_base (12)..(12): 2'-hydroxy corresponding base
  modified_base (13)..(13): 2'-hydroxy corresponding base
  modified_base (14)..(14): 2'-hydroxy corresponding base
  modified_base (15)..(15): 2'-hydroxy corresponding base
  modified_base (16)..(16): 2'-hydroxy corresponding base
  modified_base (17)..(17): 2'-O-methyl corresponding base
  modified_base (18)..(18): 2'-O-methyl corresponding base
  modified_base (19)..(19): 2'-O-methyl corresponding base
  modified_base (20)..(20): deoxythymidine
  modified_base (21)..(21): 5'-thio thymidine
aguaagaagaggcuuggcutt

SEQ ID NO: 1087 - DNA, 21 bp, Artificial Sequence
  Description of Artificial Sequence: Synthetic oligonucleotide
  Description of Combined DNA/RNA Molecule: Synthetic oligonucleotide
  siRNAs to PCSK9
  modified_base (1)..(1): 2'-hydroxy corresponding base
  modified_base (2)..(2): 2'-O-methyl corresponding base
  modified_base (3)..(3): 2'-hydroxy corresponding base
  modified_base (4)..(4): 2'-O-methyl corresponding base
  modified_base (5)..(5): 2'-hydroxy corresponding base
  modified_base (6)..(6): 2'-O-methyl corresponding base
  modified_base (7)..(7): 2'-hydroxy corresponding base
  modified_base (8)..(8): 2'-O-methyl corresponding base
  modified_base (9)..(9): 2'-hydroxy corresponding base
  modified_base (10)..(10): 2'-O-methyl corresponding base
  modified_base (11)..(11): 2'-hydroxy corresponding base
  modified_base (12)..(12): 2'-O-methyl corresponding base
  modified_base (13)..(13): 2'-hydroxy corresponding base
  modified_base (14)..(14): 2'-O-methyl corresponding base
  modified_base (15)..(15): 2'-hydroxy corresponding base
  modified_base (16)..(16): 2'-O-methyl corresponding base
  modified_base (17)..(17): 2'-hydroxy corresponding base
  modified_base (18)..(18): 2'-O-methyl corresponding base
  modified_base (19)..(19): 2'-hydroxy corresponding base
  modified_base (20)..(20): deoxythymidine
  modified_base (21)..(21): 5'-thio thymidine
agccaagccucuucuuacutt

SEQ ID NO: 1088 - DNA, 21 bp, Artificial Sequence
  Description of Artificial Sequence: Synthetic oligonucleotide
  Description of Combined DNA/RNA Molecule: Synthetic oligonucleotide
  siRNAs to PCSK9
  modified_base (1)..(1): 2'-hydroxy corresponding base
  modified_base (2)..(2): 2'-hydroxy corresponding base
  modified_base (3)..(3): 2'-hydroxy corresponding base
  modified_base (4)..(4): 2'-hydroxy corresponding base
  modified_base (5)..(5): 2'-hydroxy corresponding base
  modified_base (6)..(6): 2'-O-methyl corresponding base
  modified_base (7)..(7): 2'-O-methyl corresponding base
  modified_base (8)..(8): 2'-hydroxy corresponding base
  modified_base (9)..(9): 2'-hydroxy corresponding base
  modified_base (10)..(10): 2'-O-methyl corresponding base
  modified_base (11)..(11): 2'-O-methyl corresponding base
  modified_base (12)..(12): 2'-hydroxy corresponding base
  modified_base (13)..(13): 2'-hydroxy corresponding base
  modified_base (14)..(14): 2'-hydroxy corresponding base
  modified_base (15)..(15): 2'-hydroxy corresponding base
  modified_base (16)..(16): 2'-hydroxy corresponding base
  modified_base (17)..(17): 2'-O-methyl corresponding base
  modified_base (18)..(18): 2'-O-methyl corresponding base
  modified_base (19)..(19): 2'-O-methyl corresponding base
  modified_base (20)..(20): deoxythymidine
  modified_base (21)..(21): 5'-thio thymidine
aguaagaagaggcuuggcutt

SEQ ID NO: 1089 - DNA, 21 bp, Artificial Sequence
  Description of Artificial Sequence: Synthetic oligonucleotide
  Description of Combined DNA/RNA Molecule: Synthetic oligonucleotide
  siRNAs to PCSK9
  modified_base (1)..(1): 2'-deoxy-2'-fluoro corresponding base
  modified_base (2)..(2): 2'-O-methyl corresponding base
  modified_base (3)..(3): 2'-deoxy-2'-fluoro corresponding base
  modified_base (4)..(4): 2'-O-methyl corresponding base
  modified_base (5)..(5): 2'-deoxy-2'-fluoro corresponding base
  modified_base (6)..(6): 2'-O-methyl corresponding base
  modified_base (7)..(7): 2'-deoxy-2'-fluoro corresponding base
  modified_base (8)..(8): 2'-O-methyl corresponding base
  modified_base (9)..(9): 2'-deoxy-2'-fluoro corresponding base
  modified_base (10)..(10): 2'-O-methyl corresponding base
  modified_base (11)..(11): 2'-deoxy-2'-fluoro corresponding base
  modified_base (12)..(12): 2'-O-methyl corresponding base
  modified_base (13)..(13): 2'-deoxy-2'-fluoro corresponding base
  modified_base (14)..(14): 2'-O-methyl corresponding base
  modified_base (15)..(15): 2'-deoxy-2'-fluoro corresponding base
  modified_base (16)..(16): 2'-O-methyl corresponding base
  modified_base (17)..(17): 2'-deoxy-2'-fluoro corresponding base
  modified_base (18)..(18): 2'-O-methyl corresponding base
  modified_base (19)..(19): 2'-deoxy-2'-fluoro corresponding base
  modified_base (20)..(20): deoxythymidine
  modified_base (21)..(21): 5'-thio thymidine
ugguucccugaggaccagctt

SEQ ID NO: 1090 - DNA, 21 bp, Artificial Sequence
  Description of Artificial Sequence: Synthetic oligonucleotide
  Description of Combined DNA/RNA Molecule: Synthetic oligonucleotide
  siRNAs to PCSK9
  modified_base (1)..(1): 2'-O-methyl corresponding base
  modified_base (2)..(2): 2'-deoxy-2'-fluoro corresponding base
  modified_base (3)..(3): 2'-O-methyl corresponding base
  modified_base (4)..(4): 2'-deoxy-2'-fluoro corresponding base
  modified_base (5)..(5): 2'-O-methyl corresponding base
  modified_base (6)..(6): 2'-deoxy-2'-fluoro corresponding base
  modified_base (7)..(7): 2'-O-methyl corresponding base
  modified_base (8)..(8): 2'-deoxy-2'-fluoro corresponding base
  modified_base (9)..(9): 2'-O-methyl corresponding base
  modified_base (10)..(10): 2'-deoxy-2'-fluoro corresponding base
  modified_base (11)..(11): 2'-O-methyl corresponding base
  modified_base (12)..(12): 2'-deoxy-2'-fluoro corresponding base
  modified_base (13)..(13): 2'-O-methyl corresponding base
  modified_base (14)..(14): 2'-deoxy-2'-fluoro corresponding base
  modified_base (15)..(15): 2'-O-methyl corresponding base
  modified_base (16)..(16): 2'-deoxy-2'-fluoro corresponding base
  modified_base (17)..(17): 2'-O-methyl corresponding base
  modified_base (18)..(18): 2'-deoxy-2'-fluoro corresponding base
  modified_base (19)..(19): 2'-O-methyl corresponding base
  modified_base (20)..(20): deoxythymidine
  modified_base (21)..(21): 5'-thio thymidine
gcugguccucagggaaccatt

SEQ ID NO: 1091 - DNA, 21 bp, Artificial Sequence
  Description of Artificial Sequence: Synthetic oligonucleotide
  Description of Combined DNA/RNA Molecule: Synthetic oligonucleotide
  siRNAs to PCSK9
  modified_base (1)..(1): 2'-deoxy-2'-fluoro corresponding base
  modified_base (2)..(2): 2'-hydroxy corresponding base
  modified_base (3)..(3): 2'-hydroxy corresponding base
  modified_base (4)..(4): 2'-deoxy-2'-fluoro corresponding base
  modified_base (5)..(5): 2'-deoxy-2'-fluoro corresponding base
  modified_base (6)..(6): 2'-deoxy-2'-fluoro corresponding base
  modified_base (7)..(7): 2'-deoxy-2'-fluoro corresponding base
  modified_base (8)..(8): 2'-deoxy-2'-fluoro corresponding base
  modified_base (9)..(9): 2'-deoxy-2'-fluoro corresponding base
  modified_base (10)..(10): 2'-hydroxy corresponding base
  modified_base (11)..(11): 2'-hydroxy corresponding base
  modified_base (12)..(12): 2'-hydroxy corresponding base
  modified_base (13)..(13): 2'-hydroxy corresponding base
  modified_base (14)..(14): 2'-hydroxy corresponding base
  modified_base (15)..(15): 2'-deoxy-2'-fluoro corresponding base
  modified_base (16)..(16): 2'-deoxy-2'-fluoro corresponding base
  modified_base (17)..(17): 2'-hydroxy corresponding base
  modified_base (18)..(18): 2'-hydroxy corresponding base
  modified_base (19)..(19): 2'-deoxy-2'-fluoro corresponding base
  modified_base (20)..(20): deoxythymidine
  modified_base (21)..(21): 5'-thio thymidine
ugguucccugaggaccagctt

SEQ ID NO: 1092 - DNA, 21 bp, Artificial Sequence
  Description of Artificial Sequence: Synthetic oligonucleotide
  Description of Combined DNA/RNA Molecule: Synthetic oligonucleotide
  siRNAs to PCSK9
  modified_base (1)..(1): 2'-hydroxy corresponding base
  modified_base (2)..(2): 2'-deoxy-2'-fluoro corresponding base
  modified_base (3)..(3): 2'-deoxy-2'-fluoro corresponding base
  modified_base (4)..(4): 2'-hydroxy corresponding base
  modified_base (5)..(5): 2'-hydroxy corresponding base
  modified_base (6)..(6): 2'-deoxy-2'-fluoro corresponding base
  modified_base (7)..(7): 2'-deoxy-2'-fluoro corresponding base
  modified_base (8)..(8): 2'-deoxy-2'-fluoro corresponding base
  modified_base (9)..(9): 2'-deoxy-2'-fluoro corresponding base
  modified_base (10)..(10): 2'-deoxy-2'-fluoro corresponding base
  modified_base (11)..(11): 2'-hydroxy corresponding base
  modified_base (12)..(12): 2'-hydroxy corresponding base
  modified_base (13)..(13): 2'-hydroxy corresponding base
  modified_base (14)..(14): 2'-hydroxy corresponding base
  modified_base (15)..(15): 2'-hydroxy corresponding base
  modified_base (16)..(16): 2'-hydroxy corresponding base
  modified_base (17)..(17): 2'-deoxy-2'-fluoro corresponding base
  modified_base (18)..(18): 2'-deoxy-2'-fluoro corresponding base
  modified_base (19)..(19): 2'-hydroxy corresponding base
  modified_base (20)..(20): deoxythymidine
  modified_base (21)..(21): 5'-thio thymidine
gcugguccucagggaaccatt

SEQ ID NO: 1093 - DNA, 21 bp, Artificial Sequence
  Description of Artificial Sequence: Synthetic oligonucleotide
  Description of Combined DNA/RNA Molecule: Synthetic oligonucleotide
  siRNAs to PCSK9
  modified_base (1)..(1): 2'-hydroxy corresponding base
  modified_base (2)..(2): 2'-O-methyl corresponding base
  modified_base (3)..(3): 2'-hydroxy corresponding base
  modified_base (4)..(4): 2'-O-methyl corresponding base
  modified_base (5)..(5): 2'-hydroxy corresponding base
  modified_base (6)..(6): 2'-O-methyl corresponding base
  modified_base (7)..(7): 2'-hydroxy corresponding base
  modified_base (8)..(8): 2'-O-methyl corresponding base
  modified_base (9)..(9): 2'-hydroxy corresponding base
  modified_base (10)..(10): 2'-O-methyl corresponding base
  modified_base (11)..(11): 2'-hydroxy corresponding base
  modified_base (12)..(12): 2'-O-methyl corresponding base
  modified_base (13)..(13): 2'-hydroxy corresponding base
  modified_base (14)..(14): 2'-O-methyl corresponding base
  modified_base (15)..(15): 2'-hydroxy corresponding base
  modified_base (16)..(16): 2'-O-methyl corresponding base
  modified_base (17)..(17): 2'-hydroxy corresponding base
  modified_base (18)..(18): 2'-O-methyl corresponding base
  modified_base (19)..(19): 2'-hydroxy corresponding base
  modified_base (20)..(20): deoxythymidine
  modified_base (21)..(21): 5'-thio thymidine
ugguucccugaggaccagctt

SEQ ID NO: 1094 - DNA, 21 bp, Artificial Sequence
  Description of Artificial Sequence: Synthetic oligonucleotide
  Description of Combined DNA/RNA Molecule: Synthetic oligonucleotide
  siRNAs to PCSK9
  modified_base (1)..(1): 2'-O-methyl corresponding base
  modified_base (2)..(2): 2'-deoxy-2'-fluoro corresponding base
  modified_base (3)..(3): 2'-O-methyl corresponding base
  modified_base (4)..(4): 2'-deoxy-2'-fluoro corresponding base
  modified_base (5)..(5): 2'-O-methyl corresponding base
  modified_base (6)..(6): 2'-deoxy-2'-fluoro corresponding base
  modified_base (7)..(7): 2'-O-methyl corresponding base
  modified_base (8)..(8): 2'-deoxy-2'-fluoro corresponding base
  modified_base (9)..(9): 2'-O-methyl corresponding base
  modified_base (10)..(10): 2'-deoxy-2'-fluoro corresponding base
  modified_base (11)..(11): 2'-O-methyl corresponding base
  modified_base (12)..(12): 2'-deoxy-2'-fluoro corresponding base
  modified_base (13)..(13): 2'-O-methyl corresponding base
  modified_base (14)..(14): 2'-deoxy-2'-fluoro corresponding base
  modified_base (15)..(15): 2'-O-methyl corresponding base
  modified_base (16)..(16): 2'-deoxy-2'-fluoro corresponding base
  modified_base (17)..(17): 2'-O-methyl corresponding base
  modified_base (18)..(18): 2'-deoxy-2'-fluoro corresponding base
  modified_base (19)..(19): 2'-O-methyl corresponding base
  modified_base (20)..(20): deoxythymidine
  modified_base (21)..(21): 5'-thio thymidine
gcugguccucagggaaccatt

SEQ ID NO: 1095 - DNA, 21 bp, Artificial Sequence
  Description of Artificial Sequence: Synthetic oligonucleotide
  Description of Combined DNA/RNA Molecule: Synthetic oligonucleotide
  siRNAs to PCSK9
  modified_base (1)..(1): 2'-hydroxy corresponding base
  modified_base (2)..(2): 2'-O-methyl corresponding base
  modified_base (3)..(3): 2'-hydroxy corresponding base
  modified_base (4)..(4): 2'-O-methyl corresponding base
  modified_base (5)..(5): 2'-hydroxy corresponding base
  modified_base (6)..(6): 2'-O-methyl corresponding base
  modified_base (7)..(7): 2'-hydroxy corresponding base
  modified_base (8)..(8): 2'-O-methyl corresponding base
  modified_base (9)..(9): 2'-hydroxy corresponding base
  modified_base (10)..(10): 2'-O-methyl corresponding base
  modified_base (11)..(11): 2'-hydroxy corresponding base
  modified_base (12)..(12): 2'-O-methyl corresponding base
  modified_base (13)..(13): 2'-hydroxy corresponding base
  modified_base (14)..(14): 2'-O-methyl corresponding base
  modified_base (15)..(15): 2'-hydroxy corresponding base
  modified_base (16)..(16): 2'-O-methyl corresponding base
  modified_base (17)..(17): 2'-hydroxy corresponding base
  modified_base (18)..(18): 2'-O-methyl corresponding base
  modified_base (19)..(19): 2'-hydroxy corresponding base
  modified_base (20)..(20): deoxythymidine
  modified_base (21)..(21): 5'-thio thymidine
ugguucccugaggaccagctt

SEQ ID NO: 1096 - DNA, 21 bp, Artificial Sequence
  Description of Artificial Sequence: Synthetic oligonucleotide
  Description of Combined DNA/RNA Molecule: Synthetic oligonucleotide
  siRNAs to PCSK9
  modified_base (1)..(1): 2'-hydroxy corresponding base
  modified_base (2)..(2): 2'-deoxy-2'-fluoro corresponding base
  modified_base (3)..(3): 2'-deoxy-2'-fluoro corresponding base
  modified_base (4)..(4): 2'-hydroxy corresponding base
  modified_base (5)..(5): 2'-hydroxy corresponding base
  modified_base (6)..(6): 2'-deoxy-2'-fluoro corresponding base
  modified_base (7)..(7): 2'-deoxy-2'-fluoro corresponding base
  modified_base (8)..(8): 2'-deoxy-2'-fluoro corresponding base
  modified_base (9)..(9): 2'-deoxy-2'-fluoro corresponding base
  modified_base (10)..(10): 2'-deoxy-2'-fluoro corresponding base
  modified_base (11)..(11): 2'-hydroxy corresponding base
  modified_base (12)..(12): 2'-hydroxy corresponding base
  modified_base (13)..(13): 2'-hydroxy corresponding base
  modified_base (14)..(14): 2'-hydroxy corresponding base
  modified_base (15)..(15): 2'-hydroxy corresponding base
  modified_base (16)..(16): 2'-hydroxy corresponding base
  modified_base (17)..(17): 2'-deoxy-2'-fluoro corresponding base
  modified_base (18)..(18): 2'-deoxy-2'-fluoro corresponding base
  modified_base (19)..(19): 2'-hydroxy corresponding base
  modified_base (20)..(20): deoxythymidine
  modified_base (21)..(21): 5'-thio thymidine
gcugguccucagggaaccatt

SEQ ID NO: 1097 - DNA, 21 bp, Artificial Sequence
  Description of Artificial Sequence: Synthetic oligonucleotide
  Description of Combined DNA/RNA Molecule: Synthetic oligonucleotide
  siRNAs to PCSK9
  modified_base (1)..(1): 2'-deoxy-2'-fluoro corresponding base
  modified_base (2)..(2): 2'-O-methyl corresponding base
  modified_base (3)..(3): 2'-deoxy-2'-fluoro corresponding base
  modified_base (4)..(4): 2'-O-methyl corresponding base
  modified_base (5)..(5): 2'-deoxy-2'-fluoro corresponding base
  modified_base (6)..(6): 2'-O-methyl corresponding base
  modified_base (7)..(7): 2'-deoxy-2'-fluoro corresponding base
  modified_base (8)..(8): 2'-O-methyl corresponding base
  modified_base (9)..(9): 2'-deoxy-2'-fluoro corresponding base
  modified_base (10)..(10): 2'-O-methyl corresponding base
  modified_base (11)..(11): 2'-deoxy-2'-fluoro corresponding base
  modified_base (12)..(12): 2'-O-methyl corresponding base
  modified_base (13)..(13): 2'-deoxy-2'-fluoro corresponding base
  modified_base (14)..(14): 2'-O-methyl corresponding base
  modified_base (15)..(15): 2'-deoxy-2'-fluoro corresponding base
  modified_base (16)..(16): 2'-O-methyl corresponding base
  modified_base (17)..(17): 2'-deoxy-2'-fluoro corresponding base
  modified_base (18)..(18): 2'-O-methyl corresponding base
  modified_base (19)..(19): 2'-deoxy-2'-fluoro corresponding base
  modified_base (20)..(20): deoxythymidine
  modified_base (21)..(21): 5'-thio thymidine
ugguucccugaggaccagctt

SEQ ID NO: 1098 - DNA, 21 bp, Artificial Sequence
  Description of Artificial Sequence: Synthetic oligonucleotide
  Description of Combined DNA/RNA Molecule: Synthetic oligonucleotide
  siRNAs to PCSK9
  modified_base (1)..(1): 2'-hydroxy corresponding base
  modified_base (2)..(2): 2'-hydroxy corresponding base
  modified_base (3)..(3): 2'-hydroxy corresponding base
  modified_base (4)..(4): 2'-hydroxy corresponding base
  modified_base (5)..(5): 2'-hydroxy corresponding base
  modified_base (6)..(6): 2'-O-methyl corresponding base
  modified_base (7)..(7): 2'-O-methyl corresponding base
  modified_base (8)..(8): 2'-hydroxy corresponding base
  modified_base (9)..(9): 2'-hydroxy corresponding base
  modified_base (10)..(10): 2'-O-methyl corresponding base
  modified_base (11)..(11): 2'-O-methyl corresponding base
  modified_base (12)..(12): 2'-hydroxy corresponding base
  modified_base (13)..(13): 2'-hydroxy corresponding base
  modified_base (14)..(14): 2'-hydroxy corresponding base
  modified_base (15)..(15): 2'-hydroxy corresponding base
  modified_base (16)..(16): 2'-hydroxy corresponding base
  modified_base (17)..(17): 2'-O-methyl corresponding base
  modified_base (18)..(18): 2'-O-methyl corresponding base
  modified_base (19)..(19): 2'-O-methyl corresponding base
  modified_base (20)..(20): deoxythymidine
  modified_base (21)..(21): 5'-thio thymidine
gcugguccucagggaaccatt

SEQ ID NO: 1099 - DNA, 21 bp, Artificial Sequence
  Description of Artificial Sequence: Synthetic oligonucleotide
  Description of Combined DNA/RNA Molecule: Synthetic oligonucleotide
  siRNAs to PCSK9
  modified_base (1)..(1): 2'-deoxy-2'-fluoro corresponding base
  modified_base (2)..(2): 2'-hydroxy corresponding base
  modified_base (3)..(3): 2'-hydroxy corresponding base
  modified_base (4)..(4): 2'-deoxy-2'-fluoro corresponding base
  modified_base (5)..(5): 2'-deoxy-2'-fluoro corresponding base
  modified_base (6)..(6): 2'-deoxy-2'-fluoro corresponding base
  modified_base (7)..(7): 2'-deoxy-2'-fluoro corresponding base
  modified_base (8)..(8): 2'-deoxy-2'-fluoro corresponding base
  modified_base (9)..(9): 2'-deoxy-2'-fluoro corresponding base
  modified_base (10)..(10): 2'-hydroxy corresponding base
  modified_base (11)..(11): 2'-hydroxy corresponding base
  modified_base (12)..(12): 2'-hydroxy corresponding base
  modified_base (13)..(13): 2'-hydroxy corresponding base
  modified_base (14)..(14): 2'-hydroxy corresponding base
  modified_base (15)..(15): 2'-deoxy-2'-fluoro corresponding base
  modified_base (16)..(16): 2'-deoxy-2'-fluoro corresponding base
  modified_base (17)..(17): 2'-hydroxy corresponding base
  modified_base (18)..(18): 2'-hydroxy corresponding base
  modified_base (19)..(19): 2'-deoxy-2'-fluoro corresponding base
  modified_base (20)..(20): deoxythymidine
  modified_base (21)..(21): 5'-thio thymidine
ugguucccugaggaccagctt

SEQ ID NO: 1100 - DNA, 21 bp, Artificial Sequence
  Description of Artificial Sequence: Synthetic oligonucleotide
  Description of Combined DNA/RNA Molecule: Synthetic oligonucleotide
  siRNAs to PCSK9
  modified_base (1)..(1): 2'-hydroxy corresponding base
  modified_base (2)..(2): 2'-hydroxy corresponding base
  modified_base (3)..(3): 2'-hydroxy corresponding base
  modified_base (4)..(4): 2'-hydroxy corresponding base
  modified_base (5)..(5): 2'-hydroxy corresponding base
  modified_base (6)..(6): 2'-O-methyl corresponding base
  modified_base (7)..(7): 2'-O-methyl corresponding base
  modified_base (8)..(8): 2'-hydroxy corresponding base
  modified_base (9)..(9): 2'-hydroxy corresponding base
  modified_base (10)..(10): 2'-O-methyl corresponding base
  modified_base (11)..(11): 2'-O-methyl corresponding base
  modified_base (12)..(12): 2'-hydroxy corresponding base
  modified_base (13)..(13): 2'-hydroxy corresponding base
  modified_base (14)..(14): 2'-hydroxy corresponding base
  modified_base (15)..(15): 2'-hydroxy corresponding base
  modified_base (16)..(16): 2'-hydroxy corresponding base
  modified_base (17)..(17): 2'-O-methyl corresponding base
  modified_base (18)..(18): 2'-O-methyl corresponding base
  modified_base (19)..(19): 2'-O-methyl corresponding base
  modified_base (20)..(20): deoxythymidine
  modified_base (21)..(21): 5'-thio thymidine
gcugguccucagggaaccatt

SEQ ID NO: 1101 - DNA, 21 bp, Artificial Sequence
  Description of Artificial Sequence: Synthetic oligonucleotide
  Description of Combined DNA/RNA Molecule: Synthetic oligonucleotide
  siRNAs to PCSK9
  modified_base (1)..(1): 2'-hydroxy corresponding base
  modified_base (2)..(2): 2'-O-methyl corresponding base
  modified_base (3)..(3): 2'-hydroxy corresponding base
  modified_base (4)..(4): 2'-O-methyl corresponding base
  modified_base (5)..(5): 2'-hydroxy corresponding base
  modified_base (6)..(6): 2'-O-methyl corresponding base
  modified_base (7)..(7): 2'-hydroxy corresponding base
  modified_base (8)..(8): 2'-O-methyl corresponding base
  modified_base (9)..(9): 2'-hydroxy corresponding base
  modified_base (10)..(10): 2'-O-methyl corresponding base
  modified_base (11)..(11): 2'-hydroxy corresponding base
  modified_base (12)..(12): 2'-O-methyl corresponding base
  modified_base (13)..(13): 2'-hydroxy corresponding base
  modified_base (14)..(14): 2'-O-methyl corresponding base
  modified_base (15)..(15): 2'-hydroxy corresponding base
  modified_base (16)..(16): 2'-O-methyl corresponding base
  modified_base (17)..(17): 2'-hydroxy corresponding base
  modified_base (18)..(18): 2'-O-methyl corresponding base
  modified_base (19)..(19): 2'-hydroxy corresponding base
  modified_base (20)..(20): deoxythymidine
  modified_base (21)..(21): 5'-thio thymidine
ugguucccugaggaccagctt

SEQ ID NO: 1102 - DNA, 21 bp, Artificial Sequence
  Description of Artificial Sequence: Synthetic oligonucleotide
  Description of Combined DNA/RNA Molecule: Synthetic oligonucleotide
  siRNAs to PCSK9
  modified_base (1)..(1): 2'-hydroxy corresponding base
  modified_base (2)..(2): 2'-hydroxy corresponding base
  modified_base (3)..(3): 2'-hydroxy corresponding base
  modified_base (4)..(4): 2'-hydroxy corresponding base
  modified_base (5)..(5): 2'-hydroxy corresponding base
  modified_base (6)..(6): 2'-O-methyl corresponding base
  modified_base (7)..(7): 2'-O-methyl corresponding base
  modified_base (8)..(8): 2'-hydroxy corresponding base
  modified_base (9)..(9): 2'-hydroxy corresponding base
  modified_base (10)..(10): 2'-O-methyl corresponding base
  modified_base (11)..(11): 2'-O-methyl corresponding base
  modified_base (12)..(12): 2'-hydroxy corresponding base
  modified_base (13)..(13): 2'-hydroxy corresponding base
  modified_base (14)..(14): 2'-hydroxy corresponding base
  modified_base (15)..(15): 2'-hydroxy corresponding base
  modified_base (16)..(16): 2'-hydroxy corresponding base
  modified_base (17)..(17): 2'-O-methyl corresponding base
  modified_base (18)..(18): 2'-O-methyl corresponding base
  modified_base (19)..(19): 2'-O-methyl corresponding base
  modified_base (20)..(20): deoxythymidine
  modified_base (21)..(21): 5'-thio thymidine
gcugguccucagggaaccatt

SEQ ID NO: 1103 - DNA, 21 bp, Artificial Sequence
  Description of Artificial Sequence: Synthetic oligonucleotide
  Description of Combined DNA/RNA Molecule: Synthetic oligonucleotide
  siRNAs to PCSK9
  modified_base (1)..(1): 2'-hydroxy corresponding base
  modified_base (2)..(2): 2'-hydroxy corresponding base
  modified_base (3)..(3): 2'-hydroxy corresponding base
  modified_base (4)..(4): 2'-hydroxy corresponding base
  modified_base (5)..(5): 2'-hydroxy corresponding base
  modified_base (6)..(6): 2'-hydroxy corresponding base
  modified_base (7)..(7): 2'-hydroxy corresponding base
  modified_base (8)..(8): 2'-hydroxy corresponding base
  modified_base (9)..(9): 2'-hydroxy corresponding base
  modified_base (10)..(10): 2'-hydroxy corresponding base
  modified_base (11)..(11): 2'-hydroxy corresponding base
  modified_base (12)..(12): 2'-hydroxy corresponding base
  modified_base (13)..(13): 2'-hydroxy corresponding base
  modified_base (14)..(14): 2'-hydroxy corresponding base
  modified_base (15)..(15): 2'-hydroxy corresponding base
  modified_base (16)..(16): 2'-hydroxy corresponding base
  modified_base (17)..(17): 2'-hydroxy corresponding base
  modified_base (18)..(18): 2'-hydroxy corresponding base
  modified_base (19)..(19): 2'-hydroxy corresponding base
  modified_base (20)..(20): deoxythymidine
  modified_base (21)..(21): deoxythymidine
ucuucuuacuucacccggctt

SEQ ID NO: 1104 - DNA, 21 bp, Artificial Sequence
  Description of Artificial Sequence: Synthetic oligonucleotide
  Description of Combined DNA/RNA Molecule: Synthetic oligonucleotide
  siRNAs to PCSK9
  modified_base (1)..(1): 2'-hydroxy corresponding base
  modified_base (2)..(2): 2'-hydroxy corresponding base
  modified_base (3)..(3): 2'-hydroxy corresponding base
  modified_base (4)..(4): 2'-hydroxy corresponding base
  modified_base (5)..(5): 2'-hydroxy corresponding base
  modified_base (6)..(6): 2'-hydroxy corresponding base
  modified_base (7)..(7): 2'-hydroxy corresponding base
  modified_base (8)..(8): 2'-hydroxy corresponding base
  modified_base (9)..(9): 2'-hydroxy corresponding base
  modified_base (10)..(10): 2'-hydroxy corresponding base
  modified_base (11)..(11): 2'-hydroxy corresponding base
  modified_base (12)..(12): 2'-hydroxy corresponding base
  modified_base (13)..(13): 2'-hydroxy corresponding base
  modified_base (14)..(14): 2'-hydroxy corresponding base
  modified_base (15)..(15): 2'-hydroxy corresponding base
  modified_base (16)..(16): 2'-hydroxy corresponding base
  modified_base (17)..(17): 2'-hydroxy corresponding base
  modified_base (18)..(18): 2'-hydroxy corresponding base
  modified_base (19)..(19): 2'-hydroxy corresponding base
  modified_base (20)..(20): deoxythymidine
  modified_base (21)..(21): deoxythymidine
gccgggugaaguaagaagatt

SEQ ID NO: 1105 - DNA, 21 bp, Artificial Sequence
  Description of Artificial Sequence: Synthetic oligonucleotide
  Description of Combined DNA/RNA Molecule: Synthetic oligonucleotide
  siRNAs to PCSK9
  modified_base (1)..(1): 2'-hydroxy corresponding base
  modified_base (2)..(2): 2'-hydroxy corresponding base
  modified_base (3)..(3): 2'-hydroxy corresponding base
  modified_base (4)..(4): 2'-hydroxy corresponding base
  modified_base (5)..(5): 2'-hydroxy corresponding base
  modified_base (6)..(6): 2'-hydroxy corresponding base
  modified_base (7)..(7): 2'-hydroxy corresponding base
  modified_base (8)..(8): 2'-hydroxy corresponding base
  modified_base (9)..(9): 2'-hydroxy corresponding base
  modified_base (10)..(10): 2'-hydroxy corresponding base
  modified_base (11)..(11): 2'-hydroxy corresponding base
  modified_base (12)..(12): 2'-hydroxy corresponding base
  modified_base (13)..(13): 2'-hydroxy corresponding base
  modified_base (14)..(14): 2'-hydroxy corresponding base
  modified_base (15)..(15): 2'-hydroxy corresponding base
  modified_base (16)..(16): 2'-hydroxy corresponding base
  modified_base (17)..(17): 2'-hydroxy corresponding base
  modified_base (18)..(18): 2'-hydroxy corresponding base
  modified_base (19)..(19): 2'-hydroxy corresponding base
  modified_base (20)..(20): deoxythymidine
  modified_base (21)..(21): deoxythymidine
cuucuuacuucacccggcutt

SEQ ID NO: 1106 - DNA, 21 bp, Artificial Sequence
  Description of Artificial Sequence: Synthetic oligonucleotide
  Description of Combined DNA/RNA Molecule: Synthetic oligonucleotide
  siRNAs to PCSK9
  modified_base (1)..(1): 2'-hydroxy corresponding base
  modified_base (2)..(2): 2'-hydroxy corresponding base
  modified_base (3)..(3): 2'-hydroxy corresponding base
  modified_base (4)..(4): 2'-hydroxy corresponding base
  modified_base (5)..(5): 2'-hydroxy corresponding base
  modified_base (6)..(6): 2'-hydroxy corresponding base
  modified_base (7)..(7): 2'-hydroxy corresponding base
  modified_base (8)..(8): 2'-hydroxy corresponding base
  modified_base (9)..(9): 2'-hydroxy corresponding base
  modified_base (10)..(10): 2'-hydroxy corresponding base
  modified_base (11)..(11): 2'-hydroxy corresponding base
  modified_base (12)..(12): 2'-hydroxy corresponding base
  modified_base (13)..(13): 2'-hydroxy corresponding base
  modified_base (14)..(14): 2'-hydroxy corresponding base
  modified_base (15)..(15): 2'-hydroxy corresponding base
  modified_base (16)..(16): 2'-hydroxy corresponding base
  modified_base (17)..(17): 2'-hydroxy corresponding base
  modified_base (18)..(18): 2'-hydroxy corresponding base
  modified_base (19)..(19): 2'-hydroxy corresponding base
  modified_base (20)..(20): deoxythymidine
  modified_base (21)..(21): deoxythymidine
agccgggugaaguaagaagtt

SEQ ID NO: 1107 - DNA, 21 bp, Artificial Sequence
  Description of Artificial Sequence: Synthetic oligonucleotide
  Description of Combined DNA/RNA Molecule: Synthetic oligonucleotide
  siRNAs to PCSK9
  modified_base (1)..(1): 2'-hydroxy corresponding base
  modified_base (2)..(2): 2'-hydroxy corresponding base
  modified_base (3)..(3): 2'-hydroxy corresponding base
  modified_base (4)..(4): 2'-hydroxy corresponding base
  modified_base (5)..(5): 2'-hydroxy corresponding base
  modified_base (6)..(6): 2'-hydroxy corresponding base
  modified_base (7)..(7): 2'-hydroxy corresponding base
  modified_base (8)..(8): 2'-hydroxy corresponding base
  modified_base (9)..(9): 2'-hydroxy corresponding base
  modified_base (10)..(10): 2'-hydroxy corresponding base
  modified_base (11)..(11): 2'-hydroxy corresponding base
  modified_base (12)..(12): 2'-hydroxy corresponding base
  modified_base (13)..(13): 2'-hydroxy corresponding base
  modified_base (14)..(14): 2'-hydroxy corresponding base
  modified_base (15)..(15): 2'-hydroxy corresponding base
  modified_base (16)..(16): 2'-hydroxy corresponding base
  modified_base (17)..(17): 2'-hydroxy corresponding base
  modified_base (18)..(18): 2'-hydroxy corresponding base
  modified_base (19)..(19): 2'-hydroxy corresponding base
  modified_base (20)..(20): deoxythymidine
  modified_base (21)..(21): deoxythymidine
uucuuacuucacccggcugtt

SEQ ID NO: 1108 - DNA, 21 bp, Artificial Sequence
  Description of Artificial Sequence: Synthetic oligonucleotide
  Description of Combined DNA/RNA Molecule: Synthetic oligonucleotide
  siRNAs to PCSK9
  modified_base (1)..(1): 2'-hydroxy corresponding base
  modified_base (2)..(2): 2'-hydroxy corresponding base
  modified_base (3)..(3): 2'-hydroxy corresponding base
  modified_base (4)..(4): 2'-hydroxy corresponding base
  modified_base (5)..(5): 2'-hydroxy corresponding base
  modified_base (6)..(6): 2'-hydroxy corresponding base
  modified_base (7)..(7): 2'-hydroxy corresponding base
  modified_base (8)..(8): 2'-hydroxy corresponding base
  modified_base (9)..(9): 2'-hydroxy corresponding base
  modified_base (10)..(10): 2'-hydroxy corresponding base
  modified_base (11)..(11): 2'-hydroxy corresponding base
  modified_base (12)..(12): 2'-hydroxy corresponding base
  modified_base (13)..(13): 2'-hydroxy corresponding base
  modified_base (14)..(14): 2'-hydroxy corresponding base
  modified_base (15)..(15): 2'-hydroxy corresponding base
  modified_base (16)..(16): 2'-hydroxy corresponding base
  modified_base (17)..(17): 2'-hydroxy corresponding base
  modified_base (18)..(18): 2'-hydroxy corresponding base
  modified_base (19)..(19): 2'-hydroxy corresponding base
  modified_base (20)..(20): deoxythymidine
  modified_base (21)..(21): deoxythymidine
cagccgggugaaguaagaatt

SEQ ID NO: 1109 - DNA, 21 bp, Artificial Sequence
  Description of Artificial Sequence: Synthetic oligonucleotide
  Description of Combined DNA/RNA Molecule: Synthetic oligonucleotide
  siRNAs to PCSK9
  modified_base (1)..(1): 2'-hydroxy corresponding base
  modified_base (2)..(2): 2'-hydroxy corresponding base
  modified_base (3)..(3): 2'-hydroxy corresponding base
  modified_base (4)..(4): 2'-hydroxy corresponding base
  modified_base (5)..(5): 2'-hydroxy corresponding base
  modified_base (6)..(6): 2'-hydroxy corresponding base
  modified_base (7)..(7): 2'-hydroxy corresponding base
  modified_base (8)..(8): 2'-hydroxy corresponding base
  modified_base (9)..(9): 2'-hydroxy corresponding base
  modified_base (10)..(10): 2'-hydroxy corresponding base
  modified_base (11)..(11): 2'-hydroxy corresponding base
  modified_base (12)..(12): 2'-hydroxy corresponding base
  modified_base (13)..(13): 2'-hydroxy corresponding base
  modified_base (14)..(14): 2'-hydroxy corresponding base
  modified_base (15)..(15): 2'-hydroxy corresponding base
  modified_base (16)..(16): 2'-hydroxy corresponding base
  modified_base (17)..(17): 2'-hydroxy corresponding base
  modified_base (18)..(18): 2'-hydroxy corresponding base
  modified_base (19)..(19): 2'-hydroxy corresponding base
  modified_base (20)..(20): deoxythymidine
  modified_base (21)..(21): deoxythymidine
gggcuccucauuuuuacggtt

SEQ ID NO: 1110 - DNA, 21 bp, Artificial Sequence
  Description of Artificial Sequence: Synthetic oligonucleotide
  Description of Combined DNA/RNA Molecule: Synthetic oligonucleotide
  siRNAs to PCSK9
  modified_base (1)..(1): 2'-hydroxy corresponding base
  modified_base (2)..(2): 2'-hydroxy corresponding base
  modified_base (3)..(3): 2'-hydroxy corresponding base
  modified_base (4)..(4): 2'-hydroxy corresponding base
  modified_base (5)..(5): 2'-hydroxy corresponding base
  modified_base (6)..(6): 2'-hydroxy corresponding base
  modified_base (7)..(7): 2'-hydroxy corresponding base
  modified_base (8)..(8): 2'-hydroxy corresponding base
  modified_base (9)..(9): 2'-hydroxy corresponding base
  modified_base (10)..(10): 2'-hydroxy corresponding base
  modified_base (11)..(11): 2'-hydroxy corresponding base
  modified_base (12)..(12): 2'-hydroxy corresponding base
  modified_base (13)..(13): 2'-hydroxy corresponding base
  modified_base (14)..(14): 2'-hydroxy corresponding base
  modified_base (15)..(15): 2'-hydroxy corresponding base
  modified_base (16)..(16): 2'-hydroxy corresponding base
  modified_base (17)..(17): 2'-hydroxy corresponding base
  modified_base (18)..(18): 2'-hydroxy corresponding base
  modified_base (19)..(19): 2'-hydroxy corresponding base
  modified_base (20)..(20): deoxythymidine
  modified_base (21)..(21): deoxythymidine
ccguaaaaaugaggagccctt

SEQ ID NO: 1111 - DNA, 21 bp, Artificial Sequence
  Description of Artificial Sequence: Synthetic oligonucleotide
  Description of Combined DNA/RNA Molecule: Synthetic oligonucleotide
  siRNAs to PCSK9
  modified_base (1)..(1): 2'-hydroxy corresponding base
  modified_base (2)..(2): 2'-hydroxy corresponding base
  modified_base (3)..(3): 2'-hydroxy corresponding base
  modified_base (4)..(4): 2'-hydroxy corresponding base
  modified_base (5)..(5): 2'-hydroxy corresponding base
  modified_base (6)..(6): 2'-hydroxy corresponding base
  modified_base (7)..(7): 2'-hydroxy corresponding base
  modified_base (8)..(8): 2'-hydroxy corresponding base
  modified_base (9)..(9): 2'-hydroxy corresponding base
  modified_base (10)..(10): 2'-hydroxy corresponding base
  modified_base (11)..(11): 2'-hydroxy corresponding base
  modified_base (12)..(12): 2'-hydroxy corresponding base
  modified_base (13)..(13): 2'-hydroxy corresponding base
  modified_base (14)..(14): 2'-hydroxy corresponding base
  modified_base (15)..(15): 2'-hydroxy corresponding base
  modified_base (16)..(16): 2'-hydroxy corresponding base
  modified_base (17)..(17): 2'-hydroxy corresponding base
  modified_base (18)..(18): 2'-hydroxy corresponding base
  modified_base (19)..(19): 2'-hydroxy corresponding base
  modified_base (20)..(20): deoxythymidine
  modified_base (21)..(21): deoxythymidine
ggcuccucauuuuuacgggtt

SEQ ID NO: 1112 - DNA, 21 bp, Artificial Sequence
  Description of Artificial Sequence: Synthetic oligonucleotide
  Description of Combined DNA/RNA Molecule: Synthetic oligonucleotide
  siRNAs to PCSK9
  modified_base (1)..(1): 2'-hydroxy corresponding base
  modified_base (2)..(2): 2'-hydroxy corresponding base
  modified_base (3)..(3): 2'-hydroxy corresponding base
  modified_base (4)..(4): 2'-hydroxy corresponding base
  modified_base (5)..(5): 2'-hydroxy corresponding base
  modified_base (6)..(6): 2'-hydroxy corresponding base
  modified_base (7)..(7): 2'-hydroxy corresponding base
  modified_base (8)..(8): 2'-hydroxy corresponding base
  modified_base (9)..(9): 2'-hydroxy corresponding base
  modified_base (10)..(10): 2'-hydroxy corresponding base
  modified_base (11)..(11): 2'-hydroxy corresponding base
  modified_base (12)..(12): 2'-hydroxy corresponding base
  modified_base (13)..(13): 2'-hydroxy corresponding base
  modified_base (14)..(14): 2'-hydroxy corresponding base
  modified_base (15)..(15): 2'-hydroxy corresponding base
  modified_base (16)..(16): 2'-hydroxy corresponding base
  modified_base (17)..(17): 2'-hydroxy corresponding base
  modified_base (18)..(18): 2'-hydroxy corresponding base
  modified_base (19)..(19): 2'-hydroxy corresponding base
  modified_base (20)..(20): deoxythymidine
  modified_base (21)..(21): deoxythymidine
cccguaaaaaugaggagcctt

SEQ ID NO: 1113 - DNA, 21 bp, Artificial Sequence
  Description of Artificial Sequence: Synthetic oligonucleotide
  Description of Combined DNA/RNA Molecule: Synthetic oligonucleotide
  siRNAs to PCSK9
  modified_base (1)..(1): 2'-hydroxy corresponding base
  modified_base (2)..(2): 2'-hydroxy corresponding base
  modified_base (3)..(3): 2'-hydroxy corresponding base
  modified_base (4)..(4): 2'-hydroxy corresponding base
  modified_base (5)..(5): 2'-hydroxy corresponding base
  modified_base (6)..(6): 2'-hydroxy corresponding base
  modified_base (7)..(7): 2'-hydroxy corresponding base
  modified_base (8)..(8): 2'-hydroxy corresponding base
  modified_base (9)..(9): 2'-hydroxy corresponding base
  modified_base (10)..(10): 2'-hydroxy corresponding base
  modified_base (11)..(11): 2'-hydroxy corresponding base
  modified_base (12)..(12): 2'-hydroxy corresponding base
  modified_base (13)..(13): 2'-hydroxy corresponding base
  modified_base (14)..(14): 2'-hydroxy corresponding base
  modified_base (15)..(15): 2'-hydroxy corresponding base
  modified_base (16)..(16): 2'-hydroxy corresponding base
  modified_base (17)..(17): 2'-hydroxy corresponding base
  modified_base (18)..(18): 2'-hydroxy corresponding base
  modified_base (19)..(19): 2'-hydroxy corresponding base
  modified_base (20)..(20): deoxythymidine
  modified_base (21)..(21): deoxythymidine
gcuccucauuuuuacgggutt

SEQ ID NO: 1114 - DNA, 21 bp, Artificial Sequence
  Description of Artificial Sequence: Synthetic oligonucleotide
  Description of Combined DNA/RNA Molecule: Synthetic oligonucleotide
  siRNAs to PCSK9
  modified_base (1)..(1): 2'-hydroxy corresponding base
  modified_base (2)..(2): 2'-hydroxy corresponding base
  modified_base (3)..(3): 2'-hydroxy corresponding base
  modified_base (4)..(4): 2'-hydroxy corresponding base
  modified_base (5)..(5): 2'-hydroxy corresponding base
  modified_base (6)..(6): 2'-hydroxy corresponding base
  modified_base (7)..(7): 2'-hydroxy corresponding base
  modified_base (8)..(8): 2'-hydroxy corresponding base
  modified_base (9)..(9): 2'-hydroxy corresponding base
  modified_base (10)..(10): 2'-hydroxy corresponding base
  modified_base (11)..(11): 2'-hydroxy corresponding base
  modified_base (12)..(12): 2'-hydroxy corresponding base
  modified_base (13)..(13): 2'-hydroxy corresponding base
  modified_base (14)..(14): 2'-hydroxy corresponding base
  modified_base (15)..(15): 2'-hydroxy corresponding base
  modified_base (16)..(16): 2'-hydroxy corresponding base
  modified_base (17)..(17): 2'-hydroxy corresponding base
  modified_base (18)..(18): 2'-hydroxy corresponding base
  modified_base (19)..(19): 2'-hydroxy corresponding base
  modified_base (20)..(20): deoxythymidine
  modified_base (21)..(21): deoxythymidine
acccguaaaaaugaggagctt

SEQ ID NO: 1115 - DNA, 21 bp, Artificial Sequence
  Description of Artificial Sequence: Synthetic oligonucleotide
  Description of Combined DNA/RNA Molecule: Synthetic oligonucleotide
  siRNAs to PCSK9
  modified_base (1)..(1): 2'-hydroxy corresponding base
  modified_base (2)..(2): 2'-hydroxy corresponding base
  modified_base (3)..(3): 2'-hydroxy corresponding base
  modified_base (4)..(4): 2'-hydroxy corresponding base
  modified_base (5)..(5): 2'-hydroxy corresponding base
  modified_base (6)..(6): 2'-hydroxy corresponding base
  modified_base (7)..(7): 2'-hydroxy corresponding base
  modified_base (8)..(8): 2'-hydroxy corresponding base
  modified_base (9)..(9): 2'-hydroxy corresponding base
  modified_base (10)..(10): 2'-hydroxy corresponding base
  modified_base (11)..(11): 2'-hydroxy corresponding base
  modified_base (12)..(12): 2'-hydroxy corresponding base
  modified_base (13)..(13): 2'-hydroxy corresponding base
  modified_base (14)..(14): 2'-hydroxy corresponding base
  modified_base (15)..(15): 2'-hydroxy corresponding base
  modified_base (16)..(16): 2'-hydroxy corresponding base
  modified_base (17)..(17): 2'-hydroxy corresponding base
  modified_base (18)..(18): 2'-hydroxy corresponding base
  modified_base (19)..(19): 2'-hydroxy corresponding base
  modified_base (20)..(20): deoxythymidine
  modified_base (21)..(21): deoxythymidine
cuccucauuuuuacggguatt

SEQ ID NO: 1116 - DNA, 21 bp, Artificial Sequence
  Description of Artificial Sequence: Synthetic oligonucleotide
  Description of Combined DNA/RNA Molecule: Synthetic oligonucleotide
  siRNAs to PCSK9
  modified_base (1)..(1): 2'-hydroxy corresponding base
  modified_base (2)..(2): 2'-hydroxy corresponding base
  modified_base (3)..(3): 2'-hydroxy corresponding base
  modified_base (4)..(4): 2'-hydroxy corresponding base
  modified_base (5)..(5): 2'-hydroxy corresponding base
  modified_base (6)..(6): 2'-hydroxy corresponding base
  modified_base (7)..(7): 2'-hydroxy corresponding base
  modified_base (8)..(8): 2'-hydroxy corresponding base
  modified_base (9)..(9): 2'-hydroxy corresponding base
  modified_base (10)..(10): 2'-hydroxy corresponding base
  modified_base (11)..(11): 2'-hydroxy corresponding base
  modified_base (12)..(12): 2'-hydroxy corresponding base
  modified_base (13)..(13): 2'-hydroxy corresponding base
  modified_base (14)..(14): 2'-hydroxy corresponding base
  modified_base (15)..(15): 2'-hydroxy corresponding base
  modified_base (16)..(16): 2'-hydroxy corresponding base
  modified_base (17)..(17): 2'-hydroxy corresponding base
  modified_base (18)..(18): 2'-hydroxy corresponding base
  modified_base (19)..(19): 2'-hydroxy corresponding base
  modified_base (20)..(20): deoxythymidine
  modified_base (21)..(21): deoxythymidine
uacccguaaaaaugaggagtt

SEQ ID NO: 1117 - DNA, 21 bp, Artificial Sequence
  Description of Artificial Sequence: Synthetic oligonucleotide
  Description of Combined DNA/RNA Molecule: Synthetic oligonucleotide
  siRNAs to PCSK9
  modified_base (1)..(1): 2'-hydroxy corresponding base
  modified_base (2)..(2): 2'-hydroxy corresponding base
  modified_base (3)..(3): 2'-hydroxy corresponding base
  modified_base (4)..(4): 2'-hydroxy corresponding base
  modified_base (5)..(5): 2'-hydroxy corresponding base
  modified_base (6)..(6): 2'-hydroxy corresponding base
  modified_base (7)..(7): 2'-hydroxy corresponding base
  modified_base (8)..(8): 2'-hydroxy corresponding base
  modified_base (9)..(9): 2'-hydroxy corresponding base
  modified_base (10)..(10): 2'-hydroxy corresponding base
  modified_base (11)..(11): 2'-hydroxy corresponding base
  modified_base (12)..(12): 2'-hydroxy corresponding base
  modified_base (13)..(13): 2'-hydroxy corresponding base
  modified_base (14)..(14): 2'-hydroxy corresponding base
  modified_base (15)..(15): 2'-hydroxy corresponding base
  modified_base (16)..(16): 2'-hydroxy corresponding base
  modified_base (17)..(17): 2'-hydroxy corresponding base
  modified_base (18)..(18): 2'-hydroxy corresponding base
  modified_base (19)..(19): 2'-hydroxy corresponding base
  modified_base (20)..(20): deoxythymidine
  modified_base (21)..(21): deoxythymidine
uccucauuuuuacggguaatt

SEQ ID NO: 1118 - DNA, 21 bp, Artificial Sequence
  Description of Artificial Sequence: Synthetic oligonucleotide
  Description of Combined DNA/RNA Molecule: Synthetic oligonucleotide
  siRNAs to PCSK9
  modified_base (1)..(1): 2'-hydroxy corresponding base
  modified_base (2)..(2): 2'-hydroxy corresponding base
  modified_base (3)..(3): 2'-hydroxy corresponding base
  modified_base (4)..(4): 2'-hydroxy corresponding base
  modified_base (5)..(5): 2'-hydroxy corresponding base
  modified_base (6)..(6): 2'-hydroxy corresponding base
  modified_base (7)..(7): 2'-hydroxy corresponding base
  modified_base (8)..(8): 2'-hydroxy corresponding base
  modified_base (9)..(9): 2'-hydroxy corresponding base
  modified_base (10)..(10): 2'-hydroxy corresponding base
  modified_base (11)..(11): 2'-hydroxy corresponding base
  modified_base (12)..(12): 2'-hydroxy corresponding base
  modified_base (13)..(13): 2'-hydroxy corresponding base
  modified_base (14)..(14): 2'-hydroxy corresponding base
  modified_base (15)..(15): 2'-hydroxy corresponding base
  modified_base (16)..(16): 2'-hydroxy corresponding base
  modified_base (17)..(17): 2'-hydroxy corresponding base
  modified_base (18)..(18): 2'-hydroxy corresponding base
  modified_base (19)..(19): 2'-hydroxy corresponding base
  modified_base (20)..(20): deoxythymidine
  modified_base (21)..(21): deoxythymidine
uuacccguaaaaaugaggatt

SEQ ID NO: 1119 - DNA, 21 bp, Artificial Sequence
  Description of Artificial Sequence: Synthetic oligonucleotide
  Description of Combined DNA/RNA Molecule: Synthetic oligonucleotide
  siRNAs to PCSK9
  modified_base (1)..(1): 2'-hydroxy corresponding base
  modified_base (2)..(2): 2'-hydroxy corresponding base
  modified_base (3)..(3): 2'-hydroxy corresponding base
  modified_base (4)..(4): 2'-hydroxy corresponding base
  modified_base (5)..(5): 2'-hydroxy corresponding base
  modified_base (6)..(6): 2'-hydroxy corresponding base
  modified_base (7)..(7): 2'-hydroxy corresponding base
  modified_base (8)..(8): 2'-hydroxy corresponding base
  modified_base (9)..(9): 2'-hydroxy corresponding base
  modified_base (10)..(10): 2'-hydroxy corresponding base
  modified_base (11)..(11): 2'-hydroxy corresponding base
  modified_base (12)..(12): 2'-hydroxy corresponding base
  modified_base (13)..(13): 2'-hydroxy corresponding base
  modified_base (14)..(14): 2'-hydroxy corresponding base
  modified_base (15)..(15): 2'-hydroxy corresponding base
  modified_base (16)..(16): 2'-hydroxy corresponding base
  modified_base (17)..(17): 2'-hydroxy corresponding base
  modified_base (18)..(18): 2'-hydroxy corresponding base
  modified_base (19)..(19): 2'-hydroxy corresponding base
  modified_base (20)..(20): deoxythymidine
  modified_base (21)..(21): deoxythymidine
ccucauuuuuacggguaactt

SEQ ID NO: 1120 - DNA, 21 bp, Artificial Sequence
  Description of Artificial Sequence: Synthetic oligonucleotide
  Description of Combined DNA/RNA Molecule: Synthetic oligonucleotide
  siRNAs to PCSK9
  modified_base (1)..(1): 2'-hydroxy corresponding base
  modified_base (2)..(2): 2'-hydroxy corresponding base
  modified_base (3)..(3): 2'-hydroxy corresponding base
  modified_base (4)..(4): 2'-hydroxy corresponding base
  modified_base (5)..(5): 2'-hydroxy corresponding base
  modified_base (6)..(6): 2'-hydroxy corresponding base
  modified_base (7)..(7): 2'-hydroxy corresponding base
  modified_base (8)..(8): 2'-hydroxy corresponding base
  modified_base (9)..(9): 2'-hydroxy corresponding base
  modified_base (10)..(10): 2'-hydroxy corresponding base
  modified_base (11)..(11): 2'-hydroxy corresponding base
  modified_base (12)..(12): 2'-hydroxy corresponding base
  modified_base (13)..(13): 2'-hydroxy corresponding base
  modified_base (14)..(14): 2'-hydroxy corresponding base
  modified_base (15)..(15): 2'-hydroxy corresponding base
  modified_base (16)..(16): 2'-hydroxy corresponding base
  modified_base (17)..(17): 2'-hydroxy corresponding base
  modified_base (18)..(18): 2'-hydroxy corresponding base
  modified_base (19)..(19): 2'-hydroxy corresponding base
  modified_base (20)..(20): deoxythymidine
  modified_base (21)..(21): deoxythymidine
guuacccguaaaaaugaggtt

SEQ ID NO: 1121 - DNA, 21 bp, Artificial Sequence
  Description of Artificial Sequence: Synthetic oligonucleotide
  Description of Combined DNA/RNA Molecule: Synthetic oligonucleotide
  siRNAs to PCSK9
  modified_base (1)..(1): 2'-hydroxy corresponding base
  modified_base (2)..(2): 2'-hydroxy corresponding base
  modified_base (3)..(3): 2'-hydroxy corresponding base
  modified_base (4)..(4): 2'-hydroxy corresponding base
  modified_base (5)..(5): 2'-hydroxy corresponding base
  modified_base (6)..(6): 2'-hydroxy corresponding base
  modified_base (7)..(7): 2'-hydroxy corresponding base
  modified_base (8)..(8): 2'-hydroxy corresponding base
  modified_base (9)..(9): 2'-hydroxy corresponding base
  modified_base (10)..(10): 2'-hydroxy corresponding base
  modified_base (11)..(11): 2'-hydroxy corresponding base
  modified_base (12)..(12): 2'-hydroxy corresponding base
  modified_base (13)..(13): 2'-hydroxy corresponding base
  modified_base (14)..(14): 2'-hydroxy corresponding base
  modified_base (15)..(15): 2'-hydroxy corresponding base
  modified_base (16)..(16): 2'-hydroxy corresponding base
  modified_base (17)..(17): 2'-hydroxy corresponding base
  modified_base (18)..(18): 2'-hydroxy corresponding base
  modified_base (19)..(19): 2'-hydroxy corresponding base
  modified_base (20)..(20): deoxythymidine
  modified_base (21)..(21): deoxythymidine
cucauuuuuacggguaacatt

SEQ ID NO: 1122 - DNA, 21 bp, Artificial Sequence
  Description of Artificial Sequence: Synthetic oligonucleotide
  Description of Combined DNA/RNA Molecule: Synthetic oligonucleotide
  siRNAs to PCSK9
  modified_base (1)..(1): 2'-hydroxy corresponding base
  modified_base (2)..(2): 2'-hydroxy corresponding base
  modified_base (3)..(3): 2'-hydroxy corresponding base
  modified_base (4)..(4): 2'-hydroxy corresponding base
  modified_base (5)..(5): 2'-hydroxy corresponding base
  modified_base (6)..(6): 2'-hydroxy corresponding base
  modified_base (7)..(7): 2'-hydroxy corresponding base
  modified_base (8)..(8): 2'-hydroxy corresponding base
  modified_base (9)..(9): 2'-hydroxy corresponding base
  modified_base (10)..(10): 2'-hydroxy corresponding base
  modified_base (11)..(11): 2'-hydroxy corresponding base
  modified_base (12)..(12): 2'-hydroxy corresponding base
  modified_base (13)..(13): 2'-hydroxy corresponding base
  modified_base (14)..(14): 2'-hydroxy corresponding base
  modified_base (15)..(15): 2'-hydroxy corresponding base
  modified_base (16)..(16): 2'-hydroxy corresponding base
  modified_base (17)..(17): 2'-hydroxy corresponding base
  modified_base (18)..(18): 2'-hydroxy corresponding base
  modified_base (19)..(19): 2'-hydroxy corresponding base
  modified_base (20)..(20): deoxythymidine
  modified_base (21)..(21): deoxythymidine
uguuacccguaaaaaugagtt

SEQ ID NO: 1123 - DNA, 21 bp, Artificial Sequence
  Description of Artificial Sequence: Synthetic oligonucleotide
  Description of Combined DNA/RNA Molecule: Synthetic oligonucleotide
  siRNAs to PCSK9
  modified_base (1)..(1): 2'-hydroxy corresponding base
  modified_base (2)..(2): 2'-hydroxy corresponding base
  modified_base (3)..(3): 2'-hydroxy corresponding base
  modified_base (4)..(4): 2'-hydroxy corresponding base
  modified_base (5)..(5): 2'-hydroxy corresponding base
  modified_base (6)..(6): 2'-hydroxy corresponding base
  modified_base (7)..(7): 2'-hydroxy corresponding base
  modified_base (8)..(8): 2'-hydroxy corresponding base
  modified_base (9)..(9): 2'-hydroxy corresponding base
  modified_base (10)..(10): 2'-hydroxy corresponding base
  modified_base (11)..(11): 2'-hydroxy corresponding base
  modified_base (12)..(12): 2'-hydroxy corresponding base
  modified_base (13)..(13): 2'-hydroxy corresponding base
  modified_base (14)..(14): 2'-hydroxy corresponding base
  modified_base (15)..(15): 2'-hydroxy corresponding base
  modified_base (16)..(16): 2'-hydroxy corresponding base
  modified_base (17)..(17): 2'-hydroxy corresponding base
  modified_base (18)..(18): 2'-hydroxy corresponding base
  modified_base (19)..(19): 2'-hydroxy corresponding base
  modified_base (20)..(20): deoxythymidine
  modified_base (21)..(21): deoxythymidine
cauuuuuacggguaacagutt

SEQ ID NO: 1124 - DNA, 21 bp, Artificial Sequence
  Description of Artificial Sequence: Synthetic oligonucleotide
  Description of Combined DNA/RNA Molecule: Synthetic oligonucleotide
  siRNAs to PCSK9
  modified_base (1)..(1): 2'-hydroxy corresponding base
  modified_base (2)..(2): 2'-hydroxy corresponding base
  modified_base (3)..(3): 2'-hydroxy corresponding base
  modified_base (4)..(4): 2'-hydroxy corresponding base
  modified_base (5)..(5): 2'-hydroxy corresponding base
  modified_base (6)..(6): 2'-hydroxy corresponding base
  modified_base (7)..(7): 2'-hydroxy corresponding base
  modified_base (8)..(8): 2'-hydroxy corresponding base
  modified_base (9)..(9): 2'-hydroxy corresponding base
  modified_base (10)..(10): 2'-hydroxy corresponding base
  modified_base (11)..(11): 2'-hydroxy corresponding base
  modified_base (12)..(12): 2'-hydroxy corresponding base
  modified_base (13)..(13): 2'-hydroxy corresponding base
  modified_base (14)..(14): 2'-hydroxy corresponding base
  modified_base (15)..(15): 2'-hydroxy corresponding base
  modified_base (16)..(16): 2'-hydroxy corresponding base
  modified_base (17)..(17): 2'-hydroxy corresponding base
  modified_base (18)..(18): 2'-hydroxy corresponding base
  modified_base (19)..(19): 2'-hydroxy corresponding base
  modified_base (20)..(20): deoxythymidine
  modified_base (21)..(21): deoxythymidine
acuguuacccguaaaaaugtt

SEQ ID NO: 1125 - DNA, 21 bp, Artificial Sequence
  Description of Artificial Sequence: Synthetic oligonucleotide
  Description of Combined DNA/RNA Molecule: Synthetic oligonucleotide
  siRNAs to PCSK9
  modified_base (1)..(1): 2'-hydroxy corresponding base
  modified_base (2)..(2): 2'-hydroxy corresponding base
  modified_base (3)..(3): 2'-hydroxy corresponding base
  modified_base (4)..(4): 2'-hydroxy corresponding base
  modified_base (5)..(5): 2'-hydroxy corresponding base
  modified_base (6)..(6): 2'-hydroxy corresponding base
  modified_base (7)..(7): 2'-hydroxy corresponding base
  modified_base (8)..(8): 2'-hydroxy corresponding base
  modified_base (9)..(9): 2'-hydroxy corresponding base
  modified_base (10)..(10): 2'-hydroxy corresponding base
  modified_base (11)..(11): 2'-hydroxy corresponding base
  modified_base (12)..(12): 2'-hydroxy corresponding base
  modified_base (13)..(13): 2'-hydroxy corresponding base
  modified_base (14)..(14): 2'-hydroxy corresponding base
  modified_base (15)..(15): 2'-hydroxy corresponding base
  modified_base (16)..(16): 2'-hydroxy corresponding base
  modified_base (17)..(17): 2'-hydroxy corresponding base
  modified_base (18)..(18): 2'-hydroxy corresponding base
  modified_base (19)..(19): 2'-hydroxy corresponding base
  modified_base (20)..(20): deoxythymidine
  modified_base (21)..(21): deoxythymidine
auuuuuacggguaacagugtt

SEQ ID NO: 1126 - DNA, 21 bp, Artificial Sequence
  Description of Artificial Sequence: Synthetic oligonucleotide
  Description of Combined DNA/RNA Molecule: Synthetic oligonucleotide
  siRNAs to PCSK9
  modified_base (1)..(1): 2'-hydroxy corresponding base
  modified_base (2)..(2): 2'-hydroxy corresponding base
  modified_base (3)..(3): 2'-hydroxy corresponding base
  modified_base (4)..(4): 2'-hydroxy corresponding base
  modified_base (5)..(5): 2'-hydroxy corresponding base
  modified_base (6)..(6): 2'-hydroxy corresponding base
  modified_base (7)..(7): 2'-hydroxy corresponding base
  modified_base (8)..(8): 2'-hydroxy corresponding base
  modified_base (9)..(9): 2'-hydroxy corresponding base
  modified_base (10)..(10): 2'-hydroxy corresponding base
  modified_base (11)..(11): 2'-hydroxy corresponding base
  modified_base (12)..(12): 2'-hydroxy corresponding base
  modified_base (13)..(13): 2'-hydroxy corresponding base
  modified_base (14)..(14): 2'-hydroxy corresponding base
  modified_base (15)..(15): 2'-hydroxy corresponding base
  modified_base (16)..(16): 2'-hydroxy corresponding base
  modified_base (17)..(17): 2'-hydroxy corresponding base
  modified_base (18)..(18): 2'-hydroxy corresponding base
  modified_base (19)..(19): 2'-hydroxy corresponding base
  modified_base (20)..(20): deoxythymidine
  modified_base (21)..(21): deoxythymidine
cacuguuacccguaaaaautt

SEQ ID NO: 1127 - DNA, 21 bp, Artificial Sequence
  Description of Artificial Sequence: Synthetic oligonucleotide
  Description of Combined DNA/RNA Molecule: Synthetic oligonucleotide
  siRNAs to PCSK9
  modified_base (1)..(1): 2'-hydroxy corresponding base
  modified_base (2)..(2): 2'-hydroxy corresponding base
  modified_base (3)..(3): 2'-hydroxy corresponding base
  modified_base (4)..(4): 2'-hydroxy corresponding base
  modified_base (5)..(5): 2'-hydroxy corresponding base
  modified_base (6)..(6): 2'-hydroxy corresponding base
  modified_base (7)..(7): 2'-hydroxy corresponding base
  modified_base (8)..(8): 2'-hydroxy corresponding base
  modified_base (9)..(9): 2'-hydroxy corresponding base
  modified_base (10)..(10): 2'-hydroxy corresponding base
  modified_base (11)..(11): 2'-hydroxy corresponding base
  modified_base (12)..(12): 2'-hydroxy corresponding base
  modified_base (13)..(13): 2'-hydroxy corresponding base
  modified_base (14)..(14): 2'-hydroxy corresponding base
  modified_base (15)..(15): 2'-hydroxy corresponding base
  modified_base (16)..(16): 2'-hydroxy corresponding base
  modified_base (17)..(17): 2'-hydroxy corresponding base
  modified_base (18)..(18): 2'-hydroxy corresponding base
  modified_base (19)..(19): 2'-hydroxy corresponding base
  modified_base (20)..(20): deoxythymidine
  modified_base (21)..(21): deoxythymidine
uuuacggguaacagugaggtt

SEQ ID NO: 1128 - DNA, 21 bp, Artificial Sequence
  Description of Artificial Sequence: Synthetic oligonucleotide
  Description of Combined DNA/RNA Molecule: Synthetic oligonucleotide
  siRNAs to PCSK9
  modified_base (1)..(1): 2'-hydroxy corresponding base
  modified_base (2)..(2): 2'-hydroxy corresponding base
  modified_base (3)..(3): 2'-hydroxy corresponding base
  modified_base (4)..(4): 2'-hydroxy corresponding base
  modified_base (5)..(5): 2'-hydroxy corresponding base
  modified_base (6)..(6): 2'-hydroxy corresponding base
  modified_base (7)..(7): 2'-hydroxy corresponding base
  modified_base (8)..(8): 2'-hydroxy corresponding base
  modified_base (9)..(9): 2'-hydroxy corresponding base
  modified_base (10)..(10): 2'-hydroxy corresponding base
  modified_base (11)..(11): 2'-hydroxy corresponding base
  modified_base (12)..(12): 2'-hydroxy corresponding base
  modified_base (13)..(13): 2'-hydroxy corresponding base
  modified_base (14)..(14): 2'-hydroxy corresponding base
  modified_base (15)..(15): 2'-hydroxy corresponding base
  modified_base (16)..(16): 2'-hydroxy corresponding base
  modified_base (17)..(17): 2'-hydroxy corresponding base
  modified_base (18)..(18): 2'-hydroxy corresponding base
  modified_base (19)..(19): 2'-hydroxy corresponding base
  modified_base (20)..(20): deoxythymidine
  modified_base (21)..(21): deoxythymidine
ccucacuguuacccguaaatt

SEQ ID NO: 1129 - DNA, 21 bp, Artificial Sequence
  Description of Artificial Sequence: Synthetic oligonucleotide
  Description of Combined DNA/RNA Molecule: Synthetic oligonucleotide
  siRNAs to PCSK9
  modified_base (1)..(1): 2'-hydroxy corresponding base
  modified_base (2)..(2): 2'-hydroxy corresponding base
  modified_base (3)..(3): 2'-hydroxy corresponding base
  modified_base (4)..(4): 2'-hydroxy corresponding base
  modified_base (5)..(5): 2'-hydroxy corresponding base
  modified_base (6)..(6): 2'-hydroxy corresponding base
  modified_base (7)..(7): 2'-hydroxy corresponding base
  modified_base (8)..(8): 2'-hydroxy corresponding base
  modified_base (9)..(9): 2'-hydroxy corresponding base
  modified_base (10)..(10): 2'-hydroxy corresponding base
  modified_base (11)..(11): 2'-hydroxy corresponding base
  modified_base (12)..(12): 2'-hydroxy corresponding base
  modified_base (13)..(13): 2'-hydroxy corresponding base
  modified_base (14)..(14): 2'-hydroxy corresponding base
  modified_base (15)..(15): 2'-hydroxy corresponding base
  modified_base (16)..(16): 2'-hydroxy corresponding base
  modified_base (17)..(17): 2'-hydroxy corresponding base
  modified_base (18)..(18): 2'-hydroxy corresponding base
  modified_base (19)..(19): 2'-hydroxy corresponding base
  modified_base (20)..(20): deoxythymidine
  modified_base (21)..(21): deoxythymidine
cagaccaggaagcucggugtt

SEQ ID NO: 1130 - DNA, 21 bp, Artificial Sequence
  Description of Artificial Sequence: Synthetic oligonucleotide
  Description of Combined DNA/RNA Molecule: Synthetic oligonucleotide
  siRNAs to PCSK9
  modified_base (1)..(1): 2'-hydroxy corresponding base
  modified_base (2)..(2): 2'-hydroxy corresponding base
  modified_base (3)..(3): 2'-hydroxy corresponding base
  modified_base (4)..(4): 2'-hydroxy corresponding base
  modified_base (5)..(5): 2'-hydroxy corresponding base
  modified_base (6)..(6): 2'-hydroxy corresponding base
  modified_base (7)..(7): 2'-hydroxy corresponding base
  modified_base (8)..(8): 2'-hydroxy corresponding base
  modified_base (9)..(9): 2'-hydroxy corresponding base
  modified_base (10)..(10): 2'-hydroxy corresponding base
  modified_base (11)..(11): 2'-hydroxy corresponding base
  modified_base (12)..(12): 2'-hydroxy corresponding base
  modified_base (13)..(13): 2'-hydroxy corresponding base
  modified_base (14)..(14): 2'-hydroxy corresponding base
  modified_base (15)..(15): 2'-hydroxy corresponding base
  modified_base (16)..(16): 2'-hydroxy corresponding base
  modified_base (17)..(17): 2'-hydroxy corresponding base
  modified_base (18)..(18): 2'-hydroxy corresponding base
  modified_base (19)..(19): 2'-hydroxy corresponding base
  modified_base (20)..(20): deoxythymidine
  modified_base (21)..(21): deoxythymidine
caccgagcuuccuggucugtt

SEQ ID NO: 1131 - DNA, 21 bp, Artificial Sequence
  Description of Artificial Sequence: Synthetic oligonucleotide
  Description of Combined DNA/RNA Molecule: Synthetic oligonucleotide
  siRNAs to PCSK9
  modified_base (1)..(1): 2'-hydroxy corresponding base
  modified_base (2)..(2): 2'-hydroxy corresponding base
  modified_base (3)..(3): 2'-hydroxy corresponding base
  modified_base (4)..(4): 2'-hydroxy corresponding base
  modified_base (5)..(5): 2'-hydroxy corresponding base
  modified_base (6)..(6): 2'-hydroxy corresponding base
  modified_base (7)..(7): 2'-hydroxy corresponding base
  modified_base (8)..(8): 2'-hydroxy corresponding base
  modified_base (9)..(9): 2'-hydroxy corresponding base
  modified_base (10)..(10): 2'-hydroxy corresponding base
  modified_base (11)..(11): 2'-hydroxy corresponding base
  modified_base (12)..(12): 2'-hydroxy corresponding base
  modified_base (13)..(13): 2'-hydroxy corresponding base
  modified_base (14)..(14): 2'-hydroxy corresponding base
  modified_base (15)..(15): 2'-hydroxy corresponding base
  modified_base (16)..(16): 2'-hydroxy corresponding base
  modified_base (17)..(17): 2'-hydroxy corresponding base
  modified_base (18)..(18): 2'-hydroxy corresponding base
  modified_base (19)..(19): 2'-hydroxy corresponding base
  modified_base (20)..(20): deoxythymidine
  modified_base (21)..(21): deoxythymidine
gaccaggaagcucggugagtt

SEQ ID NO: 1132 - DNA, 21 bp, Artificial Sequence
  Description of Artificial Sequence: Synthetic oligonucleotide
  Description of Combined DNA/RNA Molecule: Synthetic oligonucleotide
  siRNAs to PCSK9
  modified_base (1)..(1): 2'-hydroxy corresponding base
  modified_base (2)..(2): 2'-hydroxy corresponding base
  modified_base (3)..(3): 2'-hydroxy corresponding base
  modified_base (4)..(4): 2'-hydroxy corresponding base
  modified_base (5)..(5): 2'-hydroxy corresponding base
  modified_base (6)..(6): 2'-hydroxy corresponding base
  modified_base (7)..(7): 2'-hydroxy corresponding base
  modified_base (8)..(8): 2'-hydroxy corresponding base
  modified_base (9)..(9): 2'-hydroxy corresponding base
  modified_base (10)..(10): 2'-hydroxy corresponding base
  modified_base (11)..(11): 2'-hydroxy corresponding base
  modified_base (12)..(12): 2'-hydroxy corresponding base
  modified_base (13)..(13): 2'-hydroxy corresponding base
  modified_base (14)..(14): 2'-hydroxy corresponding base
  modified_base (15)..(15): 2'-hydroxy corresponding base
  modified_base (16)..(16): 2'-hydroxy corresponding base
  modified_base (17)..(17): 2'-hydroxy corresponding base
  modified_base (18)..(18): 2'-hydroxy corresponding base
  modified_base (19)..(19): 2'-hydroxy corresponding base
  modified_base (20)..(20): deoxythymidine
  modified_base (21)..(21): deoxythymidine
cucaccgagcuuccugguctt

SEQ ID NO: 1133 - DNA, 21 bp, Artificial Sequence
  Description of Artificial Sequence: Synthetic oligonucleotide
  Description of Combined DNA/RNA Molecule: Synthetic oligonucleotide
  siRNAs to PCSK9
  modified_base (1)..(1): 2'-hydroxy corresponding base
  modified_base (2)..(2): 2'-hydroxy corresponding base
  modified_base (3)..(3): 2'-hydroxy corresponding base
  modified_base (4)..(4): 2'-hydroxy corresponding base
  modified_base (5)..(5): 2'-hydroxy corresponding base
  modified_base (6)..(6): 2'-hydroxy corresponding base
  modified_base (7)..(7): 2'-hydroxy corresponding base
  modified_base (8)..(8): 2'-hydroxy corresponding base
  modified_base (9)..(9): 2'-hydroxy corresponding base
  modified_base (10)..(10): 2'-hydroxy corresponding base
  modified_base (11)..(11): 2'-hydroxy corresponding base
  modified_base (12)..(12): 2'-hydroxy corresponding base
  modified_base (13)..(13): 2'-hydroxy corresponding base
  modified_base (14)..(14): 2'-hydroxy corresponding base
  modified_base (15)..(15): 2'-hydroxy corresponding base
  modified_base (16)..(16): 2'-hydroxy corresponding base
  modified_base (17)..(17): 2'-hydroxy corresponding base
  modified_base (18)..(18): 2'-hydroxy corresponding base
  modified_base (19)..(19): 2'-hydroxy corresponding base
  modified_base (20)..(20): deoxythymidine
  modified_base (21)..(21): deoxythymidine
ccaggaagcucggugagugtt

SEQ ID NO: 1134 - DNA, 21 bp, Artificial Sequence
  Description of Artificial Sequence: Synthetic oligonucleotide
  Description of Combined DNA/RNA Molecule: Synthetic oligonucleotide
  siRNAs to PCSK9
  modified_base (1)..(1): 2'-hydroxy corresponding base
  modified_base (2)..(2): 2'-hydroxy corresponding base
  modified_base (3)..(3): 2'-hydroxy corresponding base
  modified_base (4)..(4): 2'-hydroxy corresponding base
  modified_base (5)..(5): 2'-hydroxy corresponding base
  modified_base (6)..(6): 2'-hydroxy corresponding base
  modified_base (7)..(7): 2'-hydroxy corresponding base
  modified_base (8)..(8): 2'-hydroxy corresponding base
  modified_base (9)..(9): 2'-hydroxy corresponding base
  modified_base (10)..(10): 2'-hydroxy corresponding base
  modified_base (11)..(11): 2'-hydroxy corresponding base
  modified_base (12)..(12): 2'-hydroxy corresponding base
  modified_base (13)..(13): 2'-hydroxy corresponding base
  modified_base (14)..(14): 2'-hydroxy corresponding base
  modified_base (15)..(15): 2'-hydroxy corresponding base
  modified_base (16)..(16): 2'-hydroxy corresponding base
  modified_base (17)..(17): 2'-hydroxy corresponding base
  modified_base (18)..(18): 2'-hydroxy corresponding base
  modified_base (19)..(19): 2'-hydroxy corresponding base
  modified_base (20)..(20): deoxythymidine
  modified_base (21)..(21): deoxythymidine
cacucaccgagcuuccuggtt

SEQ ID NO: 1135 - DNA, 21 bp, Artificial Sequence
  Description of Artificial Sequence: Synthetic oligonucleotide
  Description of Combined DNA/RNA Molecule: Synthetic oligonucleotide
  siRNAs to PCSK9
  modified_base (1)..(1): 2'-hydroxy corresponding base
  modified_base (2)..(2): 2'-hydroxy corresponding base
  modified_base (3)..(3): 2'-hydroxy corresponding base
  modified_base (4)..(4): 2'-hydroxy corresponding base
  modified_base (5)..(5): 2'-hydroxy corresponding base
  modified_base (6)..(6): 2'-hydroxy corresponding base
  modified_base (7)..(7): 2'-hydroxy corresponding base
  modified_base (8)..(8): 2'-hydroxy corresponding base
  modified_base (9)..(9): 2'-hydroxy corresponding base
  modified_base (10)..(10): 2'-hydroxy corresponding base
  modified_base (11)..(11): 2'-hydroxy corresponding base
  modified_base (12)..(12): 2'-hydroxy corresponding base
  modified_base (13)..(13): 2'-hydroxy corresponding base
  modified_base (14)..(14): 2'-hydroxy corresponding base
  modified_base (15)..(15): 2'-hydroxy corresponding base
  modified_base (16)..(16): 2'-hydroxy corresponding base
  modified_base (17)..(17): 2'-hydroxy corresponding base
  modified_base (18)..(18): 2'-hydroxy corresponding base
  modified_base (19)..(19): 2'-hydroxy corresponding base
  modified_base (20)..(20): deoxythymidine
  modified_base (21)..(21): deoxythymidine
ggaagcucggugagugaugtt

SEQ ID NO: 1136 - DNA, 21 bp, Artificial Sequence
  Description of Artificial Sequence: Synthetic oligonucleotide
  Description of Combined DNA/RNA Molecule: Synthetic oligonucleotide
  siRNAs to PCSK9
  modified_base (1)..(1): 2'-hydroxy corresponding base
  modified_base (2)..(2): 2'-hydroxy corresponding base
  modified_base (3)..(3): 2'-hydroxy corresponding base
  modified_base (4)..(4): 2'-hydroxy corresponding base
  modified_base (5)..(5): 2'-hydroxy corresponding base
  modified_base (6)..(6): 2'-hydroxy corresponding base
  modified_base (7)..(7): 2'-hydroxy corresponding base
  modified_base (8)..(8): 2'-hydroxy corresponding base
  modified_base (9)..(9): 2'-hydroxy corresponding base
  modified_base (10)..(10): 2'-hydroxy corresponding base
  modified_base (11)..(11): 2'-hydroxy corresponding base
  modified_base (12)..(12): 2'-hydroxy corresponding base
  modified_base (13)..(13): 2'-hydroxy corresponding base
  modified_base (14)..(14): 2'-hydroxy corresponding base
  modified_base (15)..(15): 2'-hydroxy corresponding base
  modified_base (16)..(16): 2'-hydroxy corresponding base
  modified_base (17)..(17): 2'-hydroxy corresponding base
  modified_base (18)..(18): 2'-hydroxy corresponding base
  modified_base (19)..(19): 2'-hydroxy corresponding base
  modified_base (20)..(20): deoxythymidine
  modified_base (21)..(21): deoxythymidine
caucacucaccgagcuucctt

SEQ ID NO: 1137 - DNA, 21 bp, Artificial Sequence
  Description of Artificial Sequence: Synthetic oligonucleotide
  Description of Combined DNA/RNA Molecule: Synthetic oligonucleotide
  siRNAs to PCSK9
  modified_base (1)..(1): 2'-hydroxy corresponding base
  modified_base (2)..(2): 2'-hydroxy corresponding base
  modified_base (3)..(3): 2'-hydroxy corresponding base
  modified_base (4)..(4): 2'-hydroxy corresponding base
  modified_base (5)..(5): 2'-hydroxy corresponding base
  modified_base (6)..(6): 2'-hydroxy corresponding base
  modified_base (7)..(7): 2'-hydroxy corresponding base
  modified_base (8)..(8): 2'-hydroxy corresponding base
  modified_base (9)..(9): 2'-hydroxy corresponding base
  modified_base (10)..(10): 2'-hydroxy corresponding base
  modified_base (11)..(11): 2'-hydroxy corresponding base
  modified_base (12)..(12): 2'-hydroxy corresponding base
  modified_base (13)..(13): 2'-hydroxy corresponding base
  modified_base (14)..(14): 2'-hydroxy corresponding base
  modified_base (15)..(15): 2'-hydroxy corresponding base
  modified_base (16)..(16): 2'-hydroxy corresponding base
  modified_base (17)..(17): 2'-hydroxy corresponding base
  modified_base (18)..(18): 2'-hydroxy corresponding base
  modified_base (19)..(19): 2'-hydroxy corresponding base
  modified_base (20)..(20): deoxythymidine
  modified_base (21)..(21): deoxythymidine
gugagugauggcagaacgatt

SEQ ID NO: 1138 - DNA, 21 bp, Artificial Sequence
  Description of Artificial Sequence: Synthetic oligonucleotide
  Description of Combined DNA/RNA Molecule: Synthetic oligonucleotide
  siRNAs to PCSK9
  modified_base (1)..(1): 2'-hydroxy corresponding base
  modified_base (2)..(2): 2'-hydroxy corresponding base
  modified_base (3)..(3): 2'-hydroxy corresponding base
  modified_base (4)..(4): 2'-hydroxy corresponding base
  modified_base (5)..(5): 2'-hydroxy corresponding base
  modified_base (6)..(6): 2'-hydroxy corresponding base
  modified_base (7)..(7): 2'-hydroxy corresponding base
  modified_base (8)..(8): 2'-hydroxy corresponding base
  modified_base (9)..(9): 2'-hydroxy corresponding base
  modified_base (10)..(10): 2'-hydroxy corresponding base
  modified_base (11)..(11): 2'-hydroxy corresponding base
  modified_base (12)..(12): 2'-hydroxy corresponding base
  modified_base (13)..(13): 2'-hydroxy corresponding base
  modified_base (14)..(14): 2'-hydroxy corresponding base
  modified_base (15)..(15): 2'-hydroxy corresponding base
  modified_base (16)..(16): 2'-hydroxy corresponding base
  modified_base (17)..(17): 2'-hydroxy corresponding base
  modified_base (18)..(18): 2'-hydroxy corresponding base
  modified_base (19)..(19): 2'-hydroxy corresponding base
  modified_base (20)..(20): deoxythymidine
  modified_base (21)..(21): deoxythymidine
ucguucugccaucacucactt

SEQ ID NO: 1139 - DNA, 21 bp, Artificial Sequence
  Description of Artificial Sequence: Synthetic oligonucleotide
  Description of Combined DNA/RNA Molecule: Synthetic oligonucleotide
  siRNAs to PCSK9
  modified_base (1)..(1): 2'-hydroxy corresponding base
  modified_base (2)..(2): 2'-hydroxy corresponding base
  modified_base (3)..(3): 2'-hydroxy corresponding base
  modified_base (4)..(4): 2'-hydroxy corresponding base
  modified_base (5)..(5): 2'-hydroxy corresponding base
  modified_base (6)..(6): 2'-hydroxy corresponding base
  modified_base (7)..(7): 2'-hydroxy corresponding base
  modified_base (8)..(8): 2'-hydroxy corresponding base
  modified_base (9)..(9): 2'-hydroxy corresponding base
  modified_base (10)..(10): 2'-hydroxy corresponding base
  modified_base (11)..(11): 2'-hydroxy corresponding base
  modified_base (12)..(12): 2'-hydroxy corresponding base
  modified_base (13)..(13): 2'-hydroxy corresponding base
  modified_base (14)..(14): 2'-hydroxy corresponding base
  modified_base (15)..(15): 2'-hydroxy corresponding base
  modified_base (16)..(16): 2'-hydroxy corresponding base
  modified_base (17)..(17): 2'-hydroxy corresponding base
  modified_base (18)..(18): 2'-hydroxy corresponding base
  modified_base (19)..(19): 2'-hydroxy corresponding base
  modified_base (20)..(20): deoxythymidine
  modified_base (21)..(21): deoxythymidine
gagugauggcagaacgaugtt

SEQ ID NO: 1140 - DNA, 21 bp, Artificial Sequence
  Description of Artificial Sequence: Synthetic oligonucleotide
  Description of Combined DNA/RNA Molecule: Synthetic oligonucleotide
  siRNAs to PCSK9
  modified_base (1)..(1): 2'-hydroxy corresponding base
  modified_base (2)..(2): 2'-hydroxy corresponding base
  modified_base (3)..(3): 2'-hydroxy corresponding base
  modified_base (4)..(4): 2'-hydroxy corresponding base
  modified_base (5)..(5): 2'-hydroxy corresponding base
  modified_base (6)..(6): 2'-hydroxy corresponding base
  modified_base (7)..(7): 2'-hydroxy corresponding base
  modified_base (8)..(8): 2'-hydroxy corresponding base
  modified_base (9)..(9): 2'-hydroxy corresponding base
  modified_base (10)..(10): 2'-hydroxy corresponding base
  modified_base (11)..(11): 2'-hydroxy corresponding base
  modified_base (12)..(12): 2'-hydroxy corresponding base
  modified_base (13)..(13): 2'-hydroxy corresponding base
  modified_base (14)..(14): 2'-hydroxy corresponding base
  modified_base (15)..(15): 2'-hydroxy corresponding base
  modified_base (16)..(16): 2'-hydroxy corresponding base
  modified_base (17)..(17): 2'-hydroxy corresponding base
  modified_base (18)..(18): 2'-hydroxy corresponding base
  modified_base (19)..(19): 2'-hydroxy corresponding base
  modified_base (20)..(20): deoxythymidine
  modified_base (21)..(21): deoxythymidine
caucguucugccaucacuctt

SEQ ID NO: 1141 - DNA, 21 bp, Artificial Sequence
  Description of Artificial Sequence: Synthetic oligonucleotide
  Description of Combined DNA/RNA Molecule: Synthetic oligonucleotide
  siRNAs to PCSK9
  modified_base (1)..(1): 2'-hydroxy corresponding base
  modified_base (2)..(2): 2'-hydroxy corresponding base
  modified_base (3)..(3): 2'-hydroxy corresponding base
  modified_base (4)..(4): 2'-hydroxy corresponding base
  modified_base (5)..(5): 2'-hydroxy corresponding base
  modified_base (6)..(6): 2'-hydroxy corresponding base
  modified_base (7)..(7): 2'-hydroxy corresponding base
  modified_base (8)..(8): 2'-hydroxy corresponding base
  modified_base (9)..(9): 2'-hydroxy corresponding base
  modified_base (10)..(10): 2'-hydroxy corresponding base
  modified_base (11)..(11): 2'-hydroxy corresponding base
  modified_base (12)..(12): 2'-hydroxy corresponding base
  modified_base (13)..(13): 2'-hydroxy corresponding base
  modified_base (14)..(14): 2'-hydroxy corresponding base
  modified_base (15)..(15): 2'-hydroxy corresponding base
  modified_base (16)..(16): 2'-hydroxy corresponding base
  modified_base (17)..(17): 2'-hydroxy corresponding base
  modified_base (18)..(18): 2'-hydroxy corresponding base
  modified_base (19)..(19): 2'-hydroxy corresponding base
  modified_base (20)..(20): deoxythymidine
  modified_base (21)..(21): deoxythymidine
gauggcagaacgaugccugtt

SEQ ID NO: 1142 - DNA, 21 bp, Artificial Sequence
  Description of Artificial Sequence: Synthetic oligonucleotide
  Description of Combined DNA/RNA Molecule: Synthetic oligonucleotide
  siRNAs to PCSK9
  modified_base (1)..(1): 2'-hydroxy corresponding base
  modified_base (2)..(2): 2'-hydroxy corresponding base
  modified_base (3)..(3): 2'-hydroxy corresponding base
  modified_base (4)..(4): 2'-hydroxy corresponding base
  modified_base (5)..(5): 2'-hydroxy corresponding base
  modified_base (6)..(6): 2'-hydroxy corresponding base
  modified_base (7)..(7): 2'-hydroxy corresponding base
  modified_base (8)..(8): 2'-hydroxy corresponding base
  modified_base (9)..(9): 2'-hydroxy corresponding base
  modified_base (10)..(10): 2'-hydroxy corresponding base
  modified_base (11)..(11): 2'-hydroxy corresponding base
  modified_base (12)..(12): 2'-hydroxy corresponding base
  modified_base (13)..(13): 2'-hydroxy corresponding base
  modified_base (14)..(14): 2'-hydroxy corresponding base
  modified_base (15)..(15): 2'-hydroxy corresponding base
  modified_base (16)..(16): 2'-hydroxy corresponding base
  modified_base (17)..(17): 2'-hydroxy corresponding base
  modified_base (18)..(18): 2'-hydroxy corresponding base
  modified_base (19)..(19): 2'-hydroxy corresponding base
  modified_base (20)..(20): deoxythymidine
  modified_base (21)..(21): deoxythymidine
caggcaucguucugccauctt

SEQ ID NO: 1143 - DNA, 21 bp, Artificial Sequence
  Description of Artificial Sequence: Synthetic oligonucleotide
  Description of Combined DNA/RNA Molecule: Synthetic oligonucleotide
  siRNAs to PCSK9
  modified_base (1)..(1): 2'-hydroxy corresponding base
  modified_base (2)..(2): 2'-hydroxy corresponding base
  modified_base (3)..(3): 2'-hydroxy corresponding base
  modified_base (4)..(4): 2'-hydroxy corresponding base
  modified_base (5)..(5): 2'-hydroxy corresponding base
  modified_base (6)..(6): 2'-hydroxy corresponding base
  modified_base (7)..(7): 2'-hydroxy corresponding base
  modified_base (8)..(8): 2'-hydroxy corresponding base
  modified_base (9)..(9): 2'-hydroxy corresponding base
  modified_base (10)..(10): 2'-hydroxy corresponding base
  modified_base (11)..(11): 2'-hydroxy corresponding base
  modified_base (12)..(12): 2'-hydroxy corresponding base
  modified_base (13)..(13): 2'-hydroxy corresponding base
  modified_base (14)..(14): 2'-hydroxy corresponding base
  modified_base (15)..(15): 2'-hydroxy corresponding base
  modified_base (16)..(16): 2'-hydroxy corresponding base
  modified_base (17)..(17): 2'-hydroxy corresponding base
  modified_base (18)..(18): 2'-hydroxy corresponding base
  modified_base (19)..(19): 2'-hydroxy corresponding base
  modified_base (20)..(20): deoxythymidine
  modified_base (21)..(21): deoxythymidine
agaacgaugccugcaggcatt

SEQ ID NO: 1144 - DNA, 21 bp, Artificial Sequence
  Description of Artificial Sequence: Synthetic oligonucleotide
  Description of Combined DNA/RNA Molecule: Synthetic oligonucleotide
  siRNAs to PCSK9
  modified_base (1)..(1): 2'-hydroxy corresponding base
  modified_base (2)..(2): 2'-hydroxy corresponding base
  modified_base (3)..(3): 2'-hydroxy corresponding base
  modified_base (4)..(4): 2'-hydroxy corresponding base
  modified_base (5)..(5): 2'-hydroxy corresponding base
  modified_base (6)..(6): 2'-hydroxy corresponding base
  modified_base (7)..(7): 2'-hydroxy corresponding base
  modified_base (8)..(8): 2'-hydroxy corresponding base
  modified_base (9)..(9): 2'-hydroxy corresponding base
  modified_base (10)..(10): 2'-hydroxy corresponding base
  modified_base (11)..(11): 2'-hydroxy corresponding base
  modified_base (12)..(12): 2'-hydroxy corresponding base
  modified_base (13)..(13): 2'-hydroxy corresponding base
  modified_base (14)..(14): 2'-hydroxy corresponding base
  modified_base (15)..(15): 2'-hydroxy corresponding base
  modified_base (16)..(16): 2'-hydroxy corresponding base
  modified_base (17)..(17): 2'-hydroxy corresponding base
  modified_base (18)..(18): 2'-hydroxy corresponding base
  modified_base (19)..(19): 2'-hydroxy corresponding base
  modified_base (20)..(20): deoxythymidine
  modified_base (21)..(21): deoxythymidine
ugccugcaggcaucguucutt

SEQ ID NO: 1145 - DNA, 21 bp, Artificial Sequence
  Description of Artificial Sequence: Synthetic oligonucleotide
  Description of Combined DNA/RNA Molecule: Synthetic oligonucleotide
  siRNAs to PCSK9
  modified_base (1)..(1): 2'-hydroxy corresponding base
  modified_base (2)..(2): 2'-hydroxy corresponding base
  modified_base (3)..(3): 2'-hydroxy corresponding base
  modified_base (4)..(4): 2'-hydroxy corresponding base
  modified_base (5)..(5): 2'-hydroxy corresponding base
  modified_base (6)..(6): 2'-hydroxy corresponding base
  modified_base (7)..(7): 2'-hydroxy corresponding base
  modified_base (8)..(8): 2'-hydroxy corresponding base
  modified_base (9)..(9): 2'-hydroxy corresponding base
  modified_base (10)..(10): 2'-hydroxy corresponding base
  modified_base (11)..(11): 2'-hydroxy corresponding base
  modified_base (12)..(12): 2'-hydroxy corresponding base
  modified_base (13)..(13): 2'-hydroxy corresponding base
  modified_base (14)..(14): 2'-hydroxy corresponding base
  modified_base (15)..(15): 2'-hydroxy corresponding base
  modified_base (16)..(16): 2'-hydroxy corresponding base
  modified_base (17)..(17): 2'-hydroxy corresponding base
  modified_base (18)..(18): 2'-hydroxy corresponding base
  modified_base (19)..(19): 2'-hydroxy corresponding base
  modified_base (20)..(20): deoxythymidine
  modified_base (21)..(21): deoxythymidine
acgaugccugcaggcauggtt

SEQ ID NO: 1146 - DNA, 21 bp, Artificial Sequence
  Description of Artificial Sequence: Synthetic oligonucleotide
  Description of Combined DNA/RNA Molecule: Synthetic oligonucleotide
  siRNAs to PCSK9
  modified_base (1)..(1): 2'-hydroxy corresponding base
  modified_base (2)..(2): 2'-hydroxy corresponding base
  modified_base (3)..(3): 2'-hydroxy corresponding base
  modified_base (4)..(4): 2'-hydroxy corresponding base
  modified_base (5)..(5): 2'-hydroxy corresponding base
  modified_base (6)..(6): 2'-hydroxy corresponding base
  modified_base (7)..(7): 2'-hydroxy corresponding base
  modified_base (8)..(8): 2'-hydroxy corresponding base
  modified_base (9)..(9): 2'-hydroxy corresponding base
  modified_base (10)..(10): 2'-hydroxy corresponding base
  modified_base (11)..(11): 2'-hydroxy corresponding base
  modified_base (12)..(12): 2'-hydroxy corresponding base
  modified_base (13)..(13): 2'-hydroxy corresponding base
  modified_base (14)..(14): 2'-hydroxy corresponding base
  modified_base (15)..(15): 2'-hydroxy corresponding base
  modified_base (16)..(16): 2'-hydroxy corresponding base
  modified_base (17)..(17): 2'-hydroxy corresponding base
  modified_base (18)..(18): 2'-hydroxy corresponding base
  modified_base (19)..(19): 2'-hydroxy corresponding base
  modified_base (20)..(20): deoxythymidine
  modified_base (21)..(21): deoxythymidine
ccaugccugcaggcaucgutt

SEQ ID NO: 1147 - DNA, 21 bp, Artificial Sequence
  Description of Artificial Sequence: Synthetic oligonucleotide
  Description of Combined DNA/RNA Molecule: Synthetic oligonucleotide
  siRNAs to PCSK9
  modified_base (1)..(1): 2'-hydroxy corresponding base
  modified_base (2)..(2): 2'-hydroxy corresponding base
  modified_base (3)..(3): 2'-hydroxy corresponding base
  modified_base (4)..(4): 2'-hydroxy corresponding base
  modified_base (5)..(5): 2'-hydroxy corresponding base
  modified_base (6)..(6): 2'-hydroxy corresponding base
  modified_base (7)..(7): 2'-hydroxy corresponding base
  modified_base (8)..(8): 2'-hydroxy corresponding base
  modified_base (9)..(9): 2'-hydroxy corresponding base
  modified_base (10)..(10): 2'-hydroxy corresponding base
  modified_base (11)..(11): 2'-hydroxy corresponding base
  modified_base (12)..(12): 2'-hydroxy corresponding base
  modified_base (13)..(13): 2'-hydroxy corresponding base
  modified_base (14)..(14): 2'-hydroxy corresponding base
  modified_base (15)..(15): 2'-hydroxy corresponding base
  modified_base (16)..(16): 2'-hydroxy corresponding base
  modified_base (17)..(17): 2'-hydroxy corresponding base
  modified_base (18)..(18): 2'-hydroxy corresponding base
  modified_base (19)..(19): 2'-hydroxy corresponding base
  modified_base (20)..(20): deoxythymidine
  modified_base (21)..(21): deoxythymidine
gcaggcauggaacuuuuuctt

SEQ ID NO: 1148 - DNA, 21 bp, Artificial Sequence
  Description of Artificial Sequence: Synthetic oligonucleotide
  Description of Combined DNA/RNA Molecule: Synthetic oligonucleotide
  siRNAs to PCSK9
  modified_base (1)..(1): 2'-hydroxy corresponding base
  modified_base (2)..(2): 2'-hydroxy corresponding base
  modified_base (3)..(3): 2'-hydroxy corresponding base
  modified_base (4)..(4): 2'-hydroxy corresponding base
  modified_base (5)..(5): 2'-hydroxy corresponding base
  modified_base (6)..(6): 2'-hydroxy corresponding base
  modified_base (7)..(7): 2'-hydroxy corresponding base
  modified_base (8)..(8): 2'-hydroxy corresponding base
  modified_base (9)..(9): 2'-hydroxy corresponding base
  modified_base (10)..(10): 2'-hydroxy corresponding base
  modified_base (11)..(11): 2'-hydroxy corresponding base
  modified_base (12)..(12): 2'-hydroxy corresponding base
  modified_base (13)..(13): 2'-hydroxy corresponding base
  modified_base (14)..(14): 2'-hydroxy corresponding base
  modified_base (15)..(15): 2'-hydroxy corresponding base
  modified_base (16)..(16): 2'-hydroxy corresponding base
  modified_base (17)..(17): 2'-hydroxy corresponding base
  modified_base (18)..(18): 2'-hydroxy corresponding base
  modified_base (19)..(19): 2'-hydroxy corresponding base
  modified_base (20)..(20): deoxythymidine
  modified_base (21)..(21): deoxythymidine
gaaaaaguuccaugccugctt

SEQ ID NO: 1149 - DNA, 21 bp, Artificial Sequence
  Description of Artificial Sequence: Synthetic oligonucleotide
  Description of Combined DNA/RNA Molecule: Synthetic oligonucleotide
  siRNAs to PCSK9
  modified_base (1)..(1): 2'-hydroxy corresponding base
  modified_base (2)..(2): 2'-hydroxy corresponding base
  modified_base (3)..(3): 2'-hydroxy corresponding base
  modified_base (4)..(4): 2'-hydroxy corresponding base
  modified_base (5)..(5): 2'-hydroxy corresponding base
  modified_base (6)..(6): 2'-hydroxy corresponding base
  modified_base (7)..(7): 2'-hydroxy corresponding base
  modified_base (8)..(8): 2'-hydroxy corresponding base
  modified_base (9)..(9): 2'-hydroxy corresponding base
  modified_base (10)..(10): 2'-hydroxy corresponding base
  modified_base (11)..(11): 2'-hydroxy corresponding base
  modified_base (12)..(12): 2'-hydroxy corresponding base
  modified_base (13)..(13): 2'-hydroxy corresponding base
  modified_base (14)..(14): 2'-hydroxy corresponding base
  modified_base (15)..(15): 2'-hydroxy corresponding base
  modified_base (16)..(16): 2'-hydroxy corresponding base
  modified_base (17)..(17): 2'-hydroxy corresponding base
  modified_base (18)..(18): 2'-hydroxy corresponding base
  modified_base (19)..(19): 2'-hydroxy corresponding base
  modified_base (20)..(20): deoxythymidine
  modified_base (21)..(21): deoxythymidine
ggaacuuuuuccguuaucatt

SEQ ID NO: 1150 - DNA, 21 bp, Artificial Sequence
  Description of Artificial Sequence: Synthetic oligonucleotide
  Description of Combined DNA/RNA Molecule: Synthetic oligonucleotide
  siRNAs to PCSK9
  modified_base (1)..(1): 2'-hydroxy corresponding base
  modified_base (2)..(2): 2'-hydroxy corresponding base
  modified_base (3)..(3): 2'-hydroxy corresponding base
  modified_base (4)..(4): 2'-hydroxy corresponding base
  modified_base (5)..(5): 2'-hydroxy corresponding base
  modified_base (6)..(6): 2'-hydroxy corresponding base
  modified_base (7)..(7): 2'-hydroxy corresponding base
  modified_base (8)..(8): 2'-hydroxy corresponding base
  modified_base (9)..(9): 2'-hydroxy corresponding base
  modified_base (10)..(10): 2'-hydroxy corresponding base
  modified_base (11)..(11): 2'-hydroxy corresponding base
  modified_base (12)..(12): 2'-hydroxy corresponding base
  modified_base (13)..(13): 2'-hydroxy corresponding base
  modified_base (14)..(14): 2'-hydroxy corresponding base
  modified_base (15)..(15): 2'-hydroxy corresponding base
  modified_base (16)..(16): 2'-hydroxy corresponding base
  modified_base (17)..(17): 2'-hydroxy corresponding base
  modified_base (18)..(18): 2'-hydroxy corresponding base
  modified_base (19)..(19): 2'-hydroxy corresponding base
  modified_base (20)..(20): deoxythymidine
  modified_base (21)..(21): deoxythymidine
ugauaacggaaaaaguucctt

SEQ ID NO: 1151 - DNA, 21 bp, Artificial Sequence
  Description of Artificial Sequence: Synthetic oligonucleotide
  Description of Combined DNA/RNA Molecule: Synthetic oligonucleotide
  siRNAs to PCSK9
  modified_base (1)..(1): 2'-hydroxy corresponding base
  modified_base (2)..(2): 2'-hydroxy corresponding base
  modified_base (3)..(3): 2'-hydroxy corresponding base
  modified_base (4)..(4): 2'-hydroxy corresponding base
  modified_base (5)..(5): 2'-hydroxy corresponding base
  modified_base (6)..(6): 2'-hydroxy corresponding base
  modified_base (7)..(7): 2'-hydroxy corresponding base
  modified_base (8)..(8): 2'-hydroxy corresponding base
  modified_base (9)..(9): 2'-hydroxy corresponding base
  modified_base (10)..(10): 2'-hydroxy corresponding base
  modified_base (11)..(11): 2'-hydroxy corresponding base
  modified_base (12)..(12): 2'-hydroxy corresponding base
  modified_base (13)..(13): 2'-hydroxy corresponding base
  modified_base (14)..(14): 2'-hydroxy corresponding base
  modified_base (15)..(15): 2'-hydroxy corresponding base
  modified_base (16)..(16): 2'-hydroxy corresponding base
  modified_base (17)..(17): 2'-hydroxy corresponding base
  modified_base (18)..(18): 2'-hydroxy corresponding base
  modified_base (19)..(19): 2'-hydroxy corresponding base
  modified_base (20)..(20): deoxythymidine
  modified_base (21)..(21): deoxythymidine
gaacuuuuuccguuaucactt

SEQ ID NO: 1152 - DNA, 21 bp, Artificial Sequence
  Description of Artificial Sequence: Synthetic oligonucleotide
  Description of Combined DNA/RNA Molecule: Synthetic oligonucleotide
  siRNAs to PCSK9
  modified_base (1)..(1): 2'-hydroxy corresponding base
  modified_base (2)..(2): 2'-hydroxy corresponding base
  modified_base (3)..(3): 2'-hydroxy corresponding base
  modified_base (4)..(4): 2'-hydroxy corresponding base
  modified_base (5)..(5): 2'-hydroxy corresponding base
  modified_base (6)..(6): 2'-hydroxy corresponding base
  modified_base (7)..(7): 2'-hydroxy corresponding base
  modified_base (8)..(8): 2'-hydroxy corresponding base
  modified_base (9)..(9): 2'-hydroxy corresponding base
  modified_base (10)..(10): 2'-hydroxy corresponding base
  modified_base (11)..(11): 2'-hydroxy corresponding base
  modified_base (12)..(12): 2'-hydroxy corresponding base
  modified_base (13)..(13): 2'-hydroxy corresponding base
  modified_base (14)..(14): 2'-hydroxy corresponding base
  modified_base (15)..(15): 2'-hydroxy corresponding base
  modified_base (16)..(16): 2'-hydroxy corresponding base
  modified_base (17)..(17): 2'-hydroxy corresponding base
  modified_base (18)..(18): 2'-hydroxy corresponding base
  modified_base (19)..(19): 2'-hydroxy corresponding base
  modified_base (20)..(20): deoxythymidine
  modified_base (21)..(21): deoxythymidine
gugauaacggaaaaaguuctt

SEQ ID NO: 1153 - DNA, 21 bp, Artificial Sequence
  Description of Artificial Sequence: Synthetic oligonucleotide
  Description of Combined DNA/RNA Molecule: Synthetic oligonucleotide
  siRNAs to PCSK9
  modified_base (1)..(1): 2'-hydroxy corresponding base
  modified_base (2)..(2): 2'-hydroxy corresponding base
  modified_base (3)..(3): 2'-hydroxy corresponding base
  modified_base (4)..(4): 2'-hydroxy corresponding base
  modified_base (5)..(5): 2'-hydroxy corresponding base
  modified_base (6)..(6): 2'-hydroxy corresponding base
  modified_base (7)..(7): 2'-hydroxy corresponding base
  modified_base (8)..(8): 2'-hydroxy corresponding base
  modified_base (9)..(9): 2'-hydroxy corresponding base
  modified_base (10)..(10): 2'-hydroxy corresponding base
  modified_base (11)..(11): 2'-hydroxy corresponding base
  modified_base (12)..(12): 2'-hydroxy corresponding base
  modified_base (13)..(13): 2'-hydroxy corresponding base
  modified_base (14)..(14): 2'-hydroxy corresponding base
  modified_base (15)..(15): 2'-hydroxy corresponding base
  modified_base (16)..(16): 2'-hydroxy corresponding base
  modified_base (17)..(17): 2'-hydroxy corresponding base
  modified_base (18)..(18): 2'-hydroxy corresponding base
  modified_base (19)..(19): 2'-hydroxy corresponding base
  modified_base (20)..(20): deoxythymidine
  modified_base (21)..(21): deoxythymidine
aacuuuuuccguuaucacctt

SEQ ID NO: 1154 - DNA, 21 bp, Artificial Sequence
  Description of Artificial Sequence: Synthetic oligonucleotide
  Description of Combined DNA/RNA Molecule: Synthetic oligonucleotide
  siRNAs to PCSK9
  modified_base (1)..(1): 2'-hydroxy corresponding base
  modified_base (2)..(2): 2'-hydroxy corresponding base
  modified_base (3)..(3): 2'-hydroxy corresponding base
  modified_base (4)..(4): 2'-hydroxy corresponding base
  modified_base (5)..(5): 2'-hydroxy corresponding base
  modified_base (6)..(6): 2'-hydroxy corresponding base
  modified_base (7)..(7): 2'-hydroxy corresponding base
  modified_base (8)..(8): 2'-hydroxy corresponding base
  modified_base (9)..(9): 2'-hydroxy corresponding base
  modified_base (10)..(10): 2'-hydroxy corresponding base
  modified_base (11)..(11): 2'-hydroxy corresponding base
  modified_base (12)..(12): 2'-hydroxy corresponding base
  modified_base (13)..(13): 2'-hydroxy corresponding base
  modified_base (14)..(14): 2'-hydroxy corresponding base
  modified_base (15)..(15): 2'-hydroxy corresponding base
  modified_base (16)..(16): 2'-hydroxy corresponding base
  modified_base (17)..(17): 2'-hydroxy corresponding base
  modified_base (18)..(18): 2'-hydroxy corresponding base
  modified_base (19)..(19): 2'-hydroxy corresponding base
  modified_base (20)..(20): deoxythymidine
  modified_base (21)..(21): deoxythymidine
ggugauaacggaaaaaguutt

SEQ ID NO: 1155 - DNA, 21 bp, Artificial Sequence
  Description of Artificial Sequence: Synthetic oligonucleotide
  Description of Combined DNA/RNA Molecule: Synthetic oligonucleotide
  siRNAs to PCSK9
  modified_base (1)..(1): 2'-hydroxy corresponding base
  modified_base (2)..(2): 2'-hydroxy corresponding base
  modified_base (3)..(3): 2'-hydroxy corresponding base
  modified_base (4)..(4): 2'-hydroxy corresponding base
  modified_base (5)..(5): 2'-hydroxy corresponding base
  modified_base (6)..(6): 2'-hydroxy corresponding base
  modified_base (7)..(7): 2'-hydroxy corresponding base
  modified_base (8)..(8): 2'-hydroxy corresponding base
  modified_base (9)..(9): 2'-hydroxy corresponding base
  modified_base (10)..(10): 2'-hydroxy corresponding base
  modified_base (11)..(11): 2'-hydroxy corresponding base
  modified_base (12)..(12): 2'-hydroxy corresponding base
  modified_base (13)..(13): 2'-hydroxy corresponding base
  modified_base (14)..(14): 2'-hydroxy corresponding base
  modified_base (15)..(15): 2'-hydroxy corresponding base
  modified_base (16)..(16): 2'-hydroxy corresponding base
  modified_base (17)..(17): 2'-hydroxy corresponding base
  modified_base (18)..(18): 2'-hydroxy corresponding base
  modified_base (19)..(19): 2'-hydroxy corresponding base
  modified_base (20)..(20): deoxythymidine
  modified_base (21)..(21): deoxythymidine
uaucacccaggccugauuctt

SEQ ID NO: 1156 - DNA, 21 bp, Artificial Sequence
  Description of Artificial Sequence: Synthetic oligonucleotide
  Description of Combined DNA/RNA Molecule: Synthetic oligonucleotide
  siRNAs to PCSK9
  modified_base (1)..(1): 2'-hydroxy corresponding base
  modified_base (2)..(2): 2'-hydroxy corresponding base
  modified_base (3)..(3): 2'-hydroxy corresponding base
  modified_base (4)..(4): 2'-hydroxy corresponding base
  modified_base (5)..(5): 2'-hydroxy corresponding base
  modified_base (6)..(6): 2'-hydroxy corresponding base
  modified_base (7)..(7): 2'-hydroxy corresponding base
  modified_base (8)..(8): 2'-hydroxy corresponding base
  modified_base (9)..(9): 2'-hydroxy corresponding base
  modified_base (10)..(10): 2'-hydroxy corresponding base
  modified_base (11)..(11): 2'-hydroxy corresponding base
  modified_base (12)..(12): 2'-hydroxy corresponding base
  modified_base (13)..(13): 2'-hydroxy corresponding base
  modified_base (14)..(14): 2'-hydroxy corresponding base
  modified_base (15)..(15): 2'-hydroxy corresponding base
  modified_base (16)..(16): 2'-hydroxy corresponding base
  modified_base (17)..(17): 2'-hydroxy corresponding base
  modified_base (18)..(18): 2'-hydroxy corresponding base
  modified_base (19)..(19): 2'-hydroxy corresponding base
  modified_base (20)..(20): deoxythymidine
  modified_base (21)..(21): deoxythymidine
gaaucaggccugggugauatt

SEQ ID NO: 1157 - DNA, 21 bp, Artificial Sequence
  Description of Artificial Sequence: Synthetic oligonucleotide
  Description of Combined DNA/RNA Molecule: Synthetic oligonucleotide
  siRNAs to PCSK9
  modified_base (1)..(1): 2'-hydroxy corresponding base
  modified_base (2)..(2): 2'-hydroxy corresponding base
  modified_base (3)..(3): 2'-hydroxy corresponding base
  modified_base (4)..(4): 2'-hydroxy corresponding base
  modified_base (5)..(5): 2'-hydroxy corresponding base
  modified_base (6)..(6): 2'-hydroxy corresponding base
  modified_base (7)..(7): 2'-hydroxy corresponding base
  modified_base (8)..(8): 2'-hydroxy corresponding base
  modified_base (9)..(9): 2'-hydroxy corresponding base
  modified_base (10)..(10): 2'-hydroxy corresponding base
  modified_base (11)..(11): 2'-hydroxy corresponding base
  modified_base (12)..(12): 2'-hydroxy corresponding base
  modified_base (13)..(13): 2'-hydroxy corresponding base
  modified_base (14)..(14): 2'-hydroxy corresponding base
  modified_base (15)..(15): 2'-hydroxy corresponding base
  modified_base (16)..(16): 2'-hydroxy corresponding base
  modified_base (17)..(17): 2'-hydroxy corresponding base
  modified_base (18)..(18): 2'-hydroxy corresponding base
  modified_base (19)..(19): 2'-hydroxy corresponding base
  modified_base (20)..(20): deoxythymidine
  modified_base (21)..(21): deoxythymidine
aggccugauucacuggccutt

SEQ ID NO: 1158 - DNA, 21 bp, Artificial Sequence
  Description of Artificial Sequence: Synthetic oligonucleotide
  Description of Combined DNA/RNA Molecule: Synthetic oligonucleotide
  siRNAs to PCSK9
  modified_base (1)..(1): 2'-hydroxy corresponding base
  modified_base (2)..(2): 2'-hydroxy corresponding base
  modified_base (3)..(3): 2'-hydroxy corresponding base
  modified_base (4)..(4): 2'-hydroxy corresponding base
  modified_base (5)..(5): 2'-hydroxy corresponding base
  modified_base (6)..(6): 2'-hydroxy corresponding base
  modified_base (7)..(7): 2'-hydroxy corresponding base
  modified_base (8)..(8): 2'-hydroxy corresponding base
  modified_base (9)..(9): 2'-hydroxy corresponding base
  modified_base (10)..(10): 2'-hydroxy corresponding base
  modified_base (11)..(11): 2'-hydroxy corresponding base
  modified_base (12)..(12): 2'-hydroxy corresponding base
  modified_base (13)..(13): 2'-hydroxy corresponding base
  modified_base (14)..(14): 2'-hydroxy corresponding base
  modified_base (15)..(15): 2'-hydroxy corresponding base
  modified_base (16)..(16): 2'-hydroxy corresponding base
  modified_base (17)..(17): 2'-hydroxy corresponding base
  modified_base (18)..(18): 2'-hydroxy corresponding base
  modified_base (19)..(19): 2'-hydroxy corresponding base
  modified_base (20)..(20): deoxythymidine
  modified_base (21)..(21): deoxythymidine
aggccagugaaucaggccutt

SEQ ID NO: 1159 - DNA, 21 bp, Artificial Sequence
  Description of Artificial Sequence: Synthetic oligonucleotide
  Description of Combined DNA/RNA Molecule: Synthetic oligonucleotide
  siRNAs to PCSK9
  modified_base (1)..(1): 2'-hydroxy corresponding base
  modified_base (2)..(2): 2'-hydroxy corresponding base
  modified_base (3)..(3): 2'-hydroxy corresponding base
  modified_base (4)..(4): 2'-hydroxy corresponding base
  modified_base (5)..(5): 2'-hydroxy corresponding base
  modified_base (6)..(6): 2'-hydroxy corresponding base
  modified_base (7)..(7): 2'-hydroxy corresponding base
  modified_base (8)..(8): 2'-hydroxy corresponding base
  modified_base (9)..(9): 2'-hydroxy corresponding base
  modified_base (10)..(10): 2'-hydroxy corresponding base
  modified_base (11)..(11): 2'-hydroxy corresponding base
  modified_base (12)..(12): 2'-hydroxy corresponding base
  modified_base (13)..(13): 2'-hydroxy corresponding base
  modified_base (14)..(14): 2'-hydroxy corresponding base
  modified_base (15)..(15): 2'-hydroxy corresponding base
  modified_base (16)..(16): 2'-hydroxy corresponding base
  modified_base (17)..(17): 2'-hydroxy corresponding base
  modified_base (18)..(18): 2'-hydroxy corresponding base
  modified_base (19)..(19): 2'-hydroxy corresponding base
  modified_base (20)..(20): deoxythymidine
  modified_base (21)..(21): deoxythymidine
ugauucacuggccuggcggtt

SEQ ID NO: 1160 - DNA, 21 bp, Artificial Sequence
  Description of Artificial Sequence: Synthetic oligonucleotide
  Description of Combined DNA/RNA Molecule: Synthetic oligonucleotide
  siRNAs to PCSK9
  modified_base (1)..(1): 2'-hydroxy corresponding base
  modified_base (2)..(2): 2'-hydroxy corresponding base
  modified_base (3)..(3): 2'-hydroxy corresponding base
  modified_base (4)..(4): 2'-hydroxy corresponding base
  modified_base (5)..(5): 2'-hydroxy corresponding base
  modified_base (6)..(6): 2'-hydroxy corresponding base
  modified_base (7)..(7): 2'-hydroxy corresponding base
  modified_base (8)..(8): 2'-hydroxy corresponding base
  modified_base (9)..(9): 2'-hydroxy corresponding base
  modified_base (10)..(10): 2'-hydroxy corresponding base
  modified_base (11)..(11): 2'-hydroxy corresponding base
  modified_base (12)..(12): 2'-hydroxy corresponding base
  modified_base (13)..(13): 2'-hydroxy corresponding base
  modified_base (14)..(14): 2'-hydroxy corresponding base
  modified_base (15)..(15): 2'-hydroxy corresponding base
  modified_base (16)..(16): 2'-hydroxy corresponding base
  modified_base (17)..(17): 2'-hydroxy corresponding base
  modified_base (18)..(18): 2'-hydroxy corresponding base
  modified_base (19)..(19): 2'-hydroxy corresponding base
  modified_base (20)..(20): deoxythymidine
  modified_base (21)..(21): deoxythymidine
ccgccaggccagugaaucatt

SEQ ID NO: 1161 - DNA, 21 bp, Artificial Sequence
  Description of Artificial Sequence: Synthetic oligonucleotide
  Description of Combined DNA/RNA Molecule: Synthetic oligonucleotide
  siRNAs to PCSK9
  modified_base (1)..(1): 2'-hydroxy corresponding base
  modified_base (2)..(2): 2'-hydroxy corresponding base
  modified_base (3)..(3): 2'-hydroxy corresponding base
  modified_base (4)..(4): 2'-hydroxy corresponding base
  modified_base (5)..(5): 2'-hydroxy corresponding base
  modified_base (6)..(6): 2'-hydroxy corresponding base
  modified_base (7)..(7): 2'-hydroxy corresponding base
  modified_base (8)..(8): 2'-hydroxy corresponding base
  modified_base (9)..(9): 2'-hydroxy corresponding base
  modified_base (10)..(10): 2'-hydroxy corresponding base
  modified_base (11)..(11): 2'-hydroxy corresponding base
  modified_base (12)..(12): 2'-hydroxy corresponding base
  modified_base (13)..(13): 2'-hydroxy corresponding base
  modified_base (14)..(14): 2'-hydroxy corresponding base
  modified_base (15)..(15): 2'-hydroxy corresponding base
  modified_base (16)..(16): 2'-hydroxy corresponding base
  modified_base (17)..(17): 2'-hydroxy corresponding base
  modified_base (18)..(18): 2'-hydroxy corresponding base
  modified_base (19)..(19): 2'-hydroxy corresponding base
  modified_base (20)..(20): deoxythymidine
  modified_base (21)..(21): deoxythymidine
auucacuggccuggcggagtt

SEQ ID NO: 1162 - DNA, 21 bp, Artificial Sequence
  Description of Artificial Sequence: Synthetic oligonucleotide
  Description of Combined DNA/RNA Molecule: Synthetic oligonucleotide
  siRNAs to PCSK9
  modified_base (1)..(1): 2'-hydroxy corresponding base
  modified_base (2)..(2): 2'-hydroxy corresponding base
  modified_base (3)..(3): 2'-hydroxy corresponding base
  modified_base (4)..(4): 2'-hydroxy corresponding base
  modified_base (5)..(5): 2'-hydroxy corresponding base
  modified_base (6)..(6): 2'-hydroxy corresponding base
  modified_base (7)..(7): 2'-hydroxy corresponding base
  modified_base (8)..(8): 2'-hydroxy corresponding base
  modified_base (9)..(9): 2'-hydroxy corresponding base
  modified_base (10)..(10): 2'-hydroxy corresponding base
  modified_base (11)..(11): 2'-hydroxy corresponding base
  modified_base (12)..(12): 2'-hydroxy corresponding base
  modified_base (13)..(13): 2'-hydroxy corresponding base
  modified_base (14)..(14): 2'-hydroxy corresponding base
  modified_base (15)..(15): 2'-hydroxy corresponding base
  modified_base (16)..(16): 2'-hydroxy corresponding base
  modified_base (17)..(17): 2'-hydroxy corresponding base
  modified_base (18)..(18): 2'-hydroxy corresponding base
  modified_base (19)..(19): 2'-hydroxy corresponding base
  modified_base (20)..(20): deoxythymidine
  modified_base (21)..(21): deoxythymidine
cuccgccaggccagugaautt

SEQ ID NO: 1163 - DNA, 21 bp, Artificial Sequence
  Description of Artificial Sequence: Synthetic oligonucleotide
  Description of Combined DNA/RNA Molecule: Synthetic oligonucleotide
  siRNAs to PCSK9
  modified_base (1)..(1): 2'-hydroxy corresponding base
  modified_base (2)..(2): 2'-hydroxy corresponding base
  modified_base (3)..(3): 2'-hydroxy corresponding base
  modified_base (4)..(4): 2'-hydroxy corresponding base
  modified_base (5)..(5): 2'-hydroxy corresponding base
  modified_base (6)..(6): 2'-hydroxy corresponding base
  modified_base (7)..(7): 2'-hydroxy corresponding base
  modified_base (8)..(8): 2'-hydroxy corresponding base
  modified_base (9)..(9): 2'-hydroxy corresponding base
  modified_base (10)..(10): 2'-hydroxy corresponding base
  modified_base (11)..(11): 2'-hydroxy corresponding base
  modified_base (12)..(12): 2'-hydroxy corresponding base
  modified_base (13)..(13): 2'-hydroxy corresponding base
  modified_base (14)..(14): 2'-hydroxy corresponding base
  modified_base (15)..(15): 2'-hydroxy corresponding base
  modified_base (16)..(16): 2'-hydroxy corresponding base
  modified_base (17)..(17): 2'-hydroxy corresponding base
  modified_base (18)..(18): 2'-hydroxy corresponding base
  modified_base (19)..(19): 2'-hydroxy corresponding base
  modified_base (20)..(20): deoxythymidine
  modified_base (21)..(21): deoxythymidine
gcuucuaaggcauggucggtt

SEQ ID NO: 1164 - DNA, 21 bp, Artificial Sequence
  Description of Artificial Sequence: Synthetic oligonucleotide
  Description of Combined DNA/RNA Molecule: Synthetic oligonucleotide
  siRNAs to PCSK9
  modified_base (1)..(1): 2'-hydroxy corresponding base
  modified_base (2)..(2): 2'-hydroxy corresponding base
  modified_base (3)..(3): 2'-hydroxy corresponding base
  modified_base (4)..(4): 2'-hydroxy corresponding base
  modified_base (5)..(5): 2'-hydroxy corresponding base
  modified_base (6)..(6): 2'-hydroxy corresponding base
  modified_base (7)..(7): 2'-hydroxy corresponding base
  modified_base (8)..(8): 2'-hydroxy corresponding base
  modified_base (9)..(9): 2'-hydroxy corresponding base
  modified_base (10)..(10): 2'-hydroxy corresponding base
  modified_base (11)..(11): 2'-hydroxy corresponding base
  modified_base (12)..(12): 2'-hydroxy corresponding base
  modified_base (13)..(13): 2'-hydroxy corresponding base
  modified_base (14)..(14): 2'-hydroxy corresponding base
  modified_base (15)..(15): 2'-hydroxy corresponding base
  modified_base (16)..(16): 2'-hydroxy corresponding base
  modified_base (17)..(17): 2'-hydroxy corresponding base
  modified_base (18)..(18): 2'-hydroxy corresponding base
  modified_base (19)..(19): 2'-hydroxy corresponding base
  modified_base (20)..(20): deoxythymidine
  modified_base (21)..(21): deoxythymidine
ccgaccaugccuuagaagctt

SEQ ID NO: 1165 - DNA, 21 bp, Artificial Sequence
  Description of Artificial Sequence: Synthetic oligonucleotide
  Description of Combined DNA/RNA Molecule: Synthetic oligonucleotide
  siRNAs to PCSK9
  modified_base (1)..(1): 2'-hydroxy corresponding base
  modified_base (2)..(2): 2'-hydroxy corresponding base
  modified_base (3)..(3): 2'-hydroxy corresponding base
  modified_base (4)..(4): 2'-hydroxy corresponding base
  modified_base (5)..(5): 2'-hydroxy corresponding base
  modified_base (6)..(6): 2'-hydroxy corresponding base
  modified_base (7)..(7): 2'-hydroxy corresponding base
  modified_base (8)..(8): 2'-hydroxy corresponding base
  modified_base (9)..(9): 2'-hydroxy corresponding base
  modified_base (10)..(10): 2'-hydroxy corresponding base
  modified_base (11)..(11): 2'-hydroxy corresponding base
  modified_base (12)..(12): 2'-hydroxy corresponding base
  modified_base (13)..(13): 2'-hydroxy corresponding base
  modified_base (14)..(14): 2'-hydroxy corresponding base
  modified_base (15)..(15): 2'-hydroxy corresponding base
  modified_base (16)..(16): 2'-hydroxy corresponding base
  modified_base (17)..(17): 2'-hydroxy corresponding base
  modified_base (18)..(18): 2'-hydroxy corresponding base
  modified_base (19)..(19): 2'-hydroxy corresponding base
  modified_base (20)..(20): deoxythymidine
  modified_base (21)..(21): deoxythymidine
cuucuaaggcauggucgggtt

SEQ ID NO: 1166 - DNA, 21 bp, Artificial Sequence
  Description of Artificial Sequence: Synthetic oligonucleotide
  Description of Combined DNA/RNA Molecule: Synthetic oligonucleotide
  siRNAs to PCSK9
  modified_base (1)..(1): 2'-hydroxy corresponding base
  modified_base (2)..(2): 2'-hydroxy corresponding base
  modified_base (3)..(3): 2'-hydroxy corresponding base
  modified_base (4)..(4): 2'-hydroxy corresponding base
  modified_base (5)..(5): 2'-hydroxy corresponding base
  modified_base (6)..(6): 2'-hydroxy corresponding base
  modified_base (7)..(7): 2'-hydroxy corresponding base
  modified_base (8)..(8): 2'-hydroxy corresponding base
  modified_base (9)..(9): 2'-hydroxy corresponding base
  modified_base (10)..(10): 2'-hydroxy corresponding base
  modified_base (11)..(11): 2'-hydroxy corresponding base
  modified_base (12)..(12): 2'-hydroxy corresponding base
  modified_base (13)..(13): 2'-hydroxy corresponding base
  modified_base (14)..(14): 2'-hydroxy corresponding base
  modified_base (15)..(15): 2'-hydroxy corresponding base
  modified_base (16)..(16): 2'-hydroxy corresponding base
  modified_base (17)..(17): 2'-hydroxy corresponding base
  modified_base (18)..(18): 2'-hydroxy corresponding base
  modified_base (19)..(19): 2'-hydroxy corresponding base
  modified_base (20)..(20): deoxythymidine
  modified_base (21)..(21): deoxythymidine
cccgaccaugccuuagaagtt

SEQ ID NO: 1167 - DNA, 21 bp, Artificial Sequence
  Description of Artificial Sequence: Synthetic oligonucleotide
  Description of Combined DNA/RNA Molecule: Synthetic oligonucleotide
  siRNAs to PCSK9
  modified_base (1)..(1): 2'-hydroxy corresponding base
  modified_base (2)..(2): 2'-hydroxy corresponding base
  modified_base (3)..(3): 2'-hydroxy corresponding base
  modified_base (4)..(4): 2'-hydroxy corresponding base
  modified_base (5)..(5): 2'-hydroxy corresponding base
  modified_base (6)..(6): 2'-hydroxy corresponding base
  modified_base (7)..(7): 2'-hydroxy corresponding base
  modified_base (8)..(8): 2'-hydroxy corresponding base
  modified_base (9)..(9): 2'-hydroxy corresponding base
  modified_base (10)..(10): 2'-hydroxy corresponding base
  modified_base (11)..(11): 2'-hydroxy corresponding base
  modified_base (12)..(12): 2'-hydroxy corresponding base
  modified_base (13)..(13): 2'-hydroxy corresponding base
  modified_base (14)..(14): 2'-hydroxy corresponding base
  modified_base (15)..(15): 2'-hydroxy corresponding base
  modified_base (16)..(16): 2'-hydroxy corresponding base
  modified_base (17)..(17): 2'-hydroxy corresponding base
  modified_base (18)..(18): 2'-hydroxy corresponding base
  modified_base (19)..(19): 2'-hydroxy corresponding base
  modified_base (20)..(20): deoxythymidine
  modified_base (21)..(21): deoxythymidine
gagggccaacaacuguccctt

SEQ ID NO: 1168 - DNA, 21 bp, Artificial Sequence
  Description of Artificial Sequence: Synthetic oligonucleotide
  Description of Combined DNA/RNA Molecule: Synthetic oligonucleotide
  siRNAs to PCSK9
  modified_base (1)..(1): 2'-hydroxy corresponding base
  modified_base (2)..(2): 2'-hydroxy corresponding base
  modified_base (3)..(3): 2'-hydroxy corresponding base
  modified_base (4)..(4): 2'-hydroxy corresponding base
  modified_base (5)..(5): 2'-hydroxy corresponding base
  modified_base (6)..(6): 2'-hydroxy corresponding base
  modified_base (7)..(7): 2'-hydroxy corresponding base
  modified_base (8)..(8): 2'-hydroxy corresponding base
  modified_base (9)..(9): 2'-hydroxy corresponding base
  modified_base (10)..(10): 2'-hydroxy corresponding base
  modified_base (11)..(11): 2'-hydroxy corresponding base
  modified_base (12)..(12): 2'-hydroxy corresponding base
  modified_base (13)..(13): 2'-hydroxy corresponding base
  modified_base (14)..(14): 2'-hydroxy corresponding base
  modified_base (15)..(15): 2'-hydroxy corresponding base
  modified_base (16)..(16): 2'-hydroxy corresponding base
  modified_base (17)..(17): 2'-hydroxy corresponding base
  modified_base (18)..(18): 2'-hydroxy corresponding base
  modified_base (19)..(19): 2'-hydroxy corresponding base
  modified_base (20)..(20): deoxythymidine
  modified_base (21)..(21): deoxythymidine
gggacaguuguuggcccuctt

SEQ ID NO: 1169 - DNA, 21 bp, Artificial Sequence
  Description of Artificial Sequence: Synthetic oligonucleotide
  Description of Combined DNA/RNA Molecule: Synthetic oligonucleotide
  siRNAs to PCSK9
  modified_base (1)..(1): 2'-hydroxy corresponding base
  modified_base (2)..(2): 2'-hydroxy corresponding base
  modified_base (3)..(3): 2'-hydroxy corresponding base
  modified_base (4)..(4): 2'-hydroxy corresponding base
  modified_base (5)..(5): 2'-hydroxy corresponding base
  modified_base (6)..(6): 2'-hydroxy corresponding base
  modified_base (7)..(7): 2'-hydroxy corresponding base
  modified_base (8)..(8): 2'-hydroxy corresponding base
  modified_base (9)..(9): 2'-hydroxy corresponding base
  modified_base (10)..(10): 2'-hydroxy corresponding base
  modified_base (11)..(11): 2'-hydroxy corresponding base
  modified_base (12)..(12): 2'-hydroxy corresponding base
  modified_base (13)..(13): 2'-hydroxy corresponding base
  modified_base (14)..(14): 2'-hydroxy corresponding base
  modified_base (15)..(15): 2'-hydroxy corresponding base
  modified_base (16)..(16): 2'-hydroxy corresponding base
  modified_base (17)..(17): 2'-hydroxy corresponding base
  modified_base (18)..(18): 2'-hydroxy corresponding base
  modified_base (19)..(19): 2'-hydroxy corresponding base
  modified_base (20)..(20): deoxythymidine
  modified_base (21)..(21): 5'-thio thymidine
acugucccuccuugagcactt

SEQ ID NO: 1170 - DNA, 21 bp, Artificial Sequence
  Description of Artificial Sequence: Synthetic oligonucleotide
  Description of Combined DNA/RNA Molecule: Synthetic oligonucleotide
  siRNAs to PCSK9
  modified_base (1)..(1): 2'-hydroxy corresponding base
  modified_base (2)..(2): 2'-hydroxy corresponding base
  modified_base (3)..(3): 2'-hydroxy corresponding base
  modified_base (4)..(4): 2'-hydroxy corresponding base
  modified_base (5)..(5): 2'-hydroxy corresponding base
  modified_base (6)..(6): 2'-hydroxy corresponding base
  modified_base (7)..(7): 2'-hydroxy corresponding base
  modified_base (8)..(8): 2'-hydroxy corresponding base
  modified_base (9)..(9): 2'-hydroxy corresponding base
  modified_base (10)..(10): 2'-hydroxy corresponding base
  modified_base (11)..(11): 2'-hydroxy corresponding base
  modified_base (12)..(12): 2'-hydroxy corresponding base
  modified_base (13)..(13): 2'-hydroxy corresponding base
  modified_base (14)..(14): 2'-hydroxy corresponding base
  modified_base (15)..(15): 2'-hydroxy corresponding base
  modified_base (16)..(16): 2'-hydroxy corresponding base
  modified_base (17)..(17): 2'-hydroxy corresponding base
  modified_base (18)..(18): 2'-hydroxy corresponding base
  modified_base (19)..(19): 2'-hydroxy corresponding base
  modified_base (20)..(20): deoxythymidine
  modified_base (21)..(21): 5'-thio thymidine
gugcucaaggagggacagutt

SEQ ID NO: 1171 - DNA, 21 bp, Artificial Sequence
  Description of Artificial Sequence: Synthetic oligonucleotide
  Description of Combined DNA/RNA Molecule: Synthetic oligonucleotide
  siRNAs to PCSK9
  modified_base (1)..(1): 2'-hydroxy corresponding base
  modified_base (2)..(2): 2'-O-methyl corresponding base
  modified_base (3)..(3): 2'-O-methyl corresponding base
  modified_base (4)..(4): 2'-hydroxy corresponding base
  modified_base (5)..(5): 2'-O-methyl corresponding base
  modified_base (6)..(6): 2'-O-methyl corresponding base
  modified_base (7)..(7): 2'-O-methyl corresponding base
  modified_base (8)..(8): 2'-O-methyl corresponding base
  modified_base (9)..(9): 2'-O-methyl corresponding base
  modified_base (10)..(10): 2'-O-methyl corresponding base
  modified_base (11)..(11): 2'-O-methyl corresponding base
  modified_base (12)..(12): 2'-O-methyl corresponding base
  modified_base (13)..(13): 2'-O-methyl corresponding base
  modified_base (14)..(14): 2'-hydroxy corresponding base
  modified_base (15)..(15): 2'-hydroxy corresponding base
  modified_base (16)..(16): 2'-hydroxy corresponding base
  modified_base (17)..(17): 2'-O-methyl corresponding base
  modified_base (18)..(18): 2'-hydroxy corresponding base
  modified_base (19)..(19): 2'-O-methyl corresponding base
  modified_base (20)..(20): deoxythymidine
  modified_base (21)..(21): 5'-thio thymidine
acugucccuccuugagcactt

SEQ ID NO: 1172 - DNA, 21 bp, Artificial Sequence
  Description of Artificial Sequence: Synthetic oligonucleotide
  Description of Combined DNA/RNA Molecule: Synthetic oligonucleotide
  siRNAs to PCSK9
  modified_base (1)..(1): 2'-hydroxy corresponding base
  modified_base (2)..(2): 2'-hydroxy corresponding base
  modified_base (3)..(3): 2'-hydroxy corresponding base
  modified_base (4)..(4): 2'-hydroxy corresponding base
  modified_base (5)..(5): 2'-hydroxy corresponding base
  modified_base (6)..(6): 2'-O-methyl corresponding base
  modified_base (7)..(7): 2'-hydroxy corresponding base
  modified_base (8)..(8): 2'-hydroxy corresponding base
  modified_base (9)..(9): 2'-hydroxy corresponding base
  modified_base (10)..(10): 2'-hydroxy corresponding base
  modified_base (11)..(11): 2'-hydroxy corresponding base
  modified_base (12)..(12): 2'-hydroxy corresponding base
  modified_base (13)..(13): 2'-hydroxy corresponding base
  modified_base (14)..(14): 2'-hydroxy corresponding base
  modified_base (15)..(15): 2'-hydroxy corresponding base
  modified_base (16)..(16): 2'-O-methyl corresponding base
  modified_base (17)..(17): 2'-hydroxy corresponding base
  modified_base (18)..(18): 2'-hydroxy corresponding base
  modified_base (19)..(19): 2'-hydroxy corresponding base
  modified_base (20)..(20): deoxythymidine
  modified_base (21)..(21): 5'-thio thymidine
gugcucaaggagggacagutt

SEQ ID NO: 1173 - DNA, 21 bp, Artificial Sequence
  Description of Artificial Sequence: Synthetic oligonucleotide
  Description of Combined DNA/RNA Molecule: Synthetic oligonucleotide
  siRNAs to PCSK9
  modified_base (1)..(1): 2'-hydroxy corresponding base
  modified_base (2)..(2): 2'-hydroxy corresponding base
  modified_base (3)..(3): 2'-hydroxy corresponding base
  modified_base (4)..(4): 2'-hydroxy corresponding base
  modified_base (5)..(5): 2'-hydroxy corresponding base
  modified_base (6)..(6): 2'-hydroxy corresponding base
  modified_base (7)..(7): 2'-hydroxy corresponding base
  modified_base (8)..(8): 2'-hydroxy corresponding base
  modified_base (9)..(9): 2'-hydroxy corresponding base
  modified_base (10)..(10): 2'-hydroxy corresponding base
  modified_base (11)..(11): 2'-hydroxy corresponding base
  modified_base (12)..(12): 2'-hydroxy corresponding base
  modified_base (13)..(13): 2'-hydroxy corresponding base
  modified_base (14)..(14): 2'-hydroxy corresponding base
  modified_base (15)..(15): 2'-hydroxy corresponding base
  modified_base (16)..(16): 2'-hydroxy corresponding base
  modified_base (17)..(17): 2'-hydroxy corresponding base
  modified_base (18)..(18): 2'-hydroxy corresponding base
  modified_base (19)..(19): 2'-hydroxy corresponding base
  modified_base (20)..(20): deoxythymidine
  modified_base (21)..(21): 5'-thio thymidine
cugucccuccuugagcacctt

SEQ ID NO: 1174 - DNA, 21 bp, Artificial Sequence
  Description of Artificial Sequence: Synthetic oligonucleotide
  Description of Combined DNA/RNA Molecule: Synthetic oligonucleotide
  siRNAs to PCSK9
  modified_base (1)..(1): 2'-hydroxy corresponding base
  modified_base (2)..(2): 2'-hydroxy corresponding base
  modified_base (3)..(3): 2'-hydroxy corresponding base
  modified_base (4)..(4): 2'-hydroxy corresponding base
  modified_base (5)..(5): 2'-hydroxy corresponding base
  modified_base (6)..(6): 2'-hydroxy corresponding base
  modified_base (7)..(7): 2'-hydroxy corresponding base
  modified_base (8)..(8): 2'-hydroxy corresponding base
  modified_base (9)..(9): 2'-hydroxy corresponding base
  modified_base (10)..(10): 2'-hydroxy corresponding base
  modified_base (11)..(11): 2'-hydroxy corresponding base
  modified_base (12)..(12): 2'-hydroxy corresponding base
  modified_base (13)..(13): 2'-hydroxy corresponding base
  modified_base (14)..(14): 2'-hydroxy corresponding base
  modified_base (15)..(15): 2'-hydroxy corresponding base
  modified_base (16)..(16): 2'-hydroxy corresponding base
  modified_base (17)..(17): 2'-hydroxy corresponding base
  modified_base (18)..(18): 2'-hydroxy corresponding base
  modified_base (19)..(19): 2'-hydroxy corresponding base
  modified_base (20)..(20): deoxythymidine
  modified_base (21)..(21): 5'-thio thymidine
ggugcucaaggagggacagtt

SEQ ID NO: 1175 - DNA, 21 bp, Artificial Sequence
  Description of Artificial Sequence: Synthetic oligonucleotide
  Description of Combined DNA/RNA Molecule: Synthetic oligonucleotide
  siRNAs to PCSK9
  modified_base (1)..(1): 2'-O-methyl corresponding base
  modified_base (2)..(2): 2'-O-methyl corresponding base
  modified_base (3)..(3): 2'-hydroxy corresponding base
  modified_base (4)..(4): 2'-O-methyl corresponding base
  modified_base (5)..(5): 2'-O-methyl corresponding base
  modified_base (6)..(6): 2'-O-methyl corresponding base
  modified_base (7)..(7): 2'-O-methyl corresponding base
  modified_base (8)..(8): 2'-O-methyl corresponding base
  modified_base (9)..(9): 2'-O-methyl corresponding base
  modified_base (10)..(10): 2'-O-methyl corresponding base
  modified_base (11)..(11): 2'-O-methyl corresponding base
  modified_base (12)..(12): 2'-O-methyl corresponding base
  modified_base (13)..(13): 2'-hydroxy corresponding base
  modified_base (14)..(14): 2'-hydroxy corresponding base
  modified_base (15)..(15): 2'-hydroxy corresponding base
  modified_base (16)..(16): 2'-O-methyl corresponding base
  modified_base (17)..(17): 2'-hydroxy corresponding base
  modified_base (18)..(18): 2'-O-methyl corresponding base
  modified_base (19)..(19): 2'-O-methyl corresponding base
  modified_base (20)..(20): deoxythymidine
  modified_base (21)..(21): 5'-thio thymidine
cugucccuccuugagcacctt

SEQ ID NO: 1176 - DNA, 21 bp, Artificial Sequence
  Description of Artificial Sequence: Synthetic oligonucleotide
  Description of Combined DNA/RNA Molecule: Synthetic oligonucleotide
  siRNAs to PCSK9
  modified_base (1)..(1): 2'-hydroxy corresponding base
  modified_base (2)..(2): 2'-hydroxy corresponding base
  modified_base (3)..(3): 2'-hydroxy corresponding base
  modified_base (4)..(4): 2'-hydroxy corresponding base
  modified_base (5)..(5): 2'-hydroxy corresponding base
  modified_base (6)..(6): 2'-hydroxy corresponding base
  modified_base (7)..(7): 2'-O-methyl corresponding base
  modified_base (8)..(8): 2'-hydroxy corresponding base
  modified_base (9)..(9): 2'-hydroxy corresponding base
  modified_base (10)..(10): 2'-hydroxy corresponding base
  modified_base (11)..(11): 2'-hydroxy corresponding base
  modified_base (12)..(12): 2'-hydroxy corresponding base
  modified_base (13)..(13): 2'-hydroxy corresponding base
  modified_base (14)..(14): 2'-hydroxy corresponding base
  modified_base (15)..(15): 2'-hydroxy corresponding base
  modified_base (16)..(16): 2'-hydroxy corresponding base
  modified_base (17)..(17): 2'-O-methyl corresponding base
  modified_base (18)..(18): 2'-hydroxy corresponding base
  modified_base (19)..(19): 2'-hydroxy corresponding base
  modified_base (20)..(20): deoxythymidine
  modified_base (21)..(21): 5'-thio thymidine
ggugcucaaggagggacagtt

SEQ ID NO: 1177 - DNA, 21 bp, Artificial Sequence
  Description of Artificial Sequence: Synthetic oligonucleotide
  Description of Combined DNA/RNA Molecule: Synthetic oligonucleotide
  siRNAs to PCSK9
  modified_base (1)..(1): 2'-hydroxy corresponding base
  modified_base (2)..(2): 2'-hydroxy corresponding base
  modified_base (3)..(3): 2'-hydroxy corresponding base
  modified_base (4)..(4): 2'-hydroxy corresponding base
  modified_base (5)..(5): 2'-hydroxy corresponding base
  modified_base (6)..(6): 2'-hydroxy corresponding base
  modified_base (7)..(7): 2'-hydroxy corresponding base
  modified_base (8)..(8): 2'-hydroxy corresponding base
  modified_base (9)..(9): 2'-hydroxy corresponding base
  modified_base (10)..(10): 2'-hydroxy corresponding base
  modified_base (11)..(11): 2'-hydroxy corresponding base
  modified_base (12)..(12): 2'-hydroxy corresponding base
  modified_base (13)..(13): 2'-hydroxy corresponding base
  modified_base (14)..(14): 2'-hydroxy corresponding base
  modified_base (15)..(15): 2'-hydroxy corresponding base
  modified_base (16)..(16): 2'-hydroxy corresponding base
  modified_base (17)..(17): 2'-hydroxy corresponding base
  modified_base (18)..(18): 2'-hydroxy corresponding base
  modified_base (19)..(19): 2'-hydroxy corresponding base
  modified_base (20)..(20): deoxythymidine
  modified_base (21)..(21): 5'-thio thymidine
acauuuaucuuuugggucutt

SEQ ID NO: 1178 - DNA, 21 bp, Artificial Sequence
  Description of Artificial Sequence: Synthetic oligonucleotide
  Description of Combined DNA/RNA Molecule: Synthetic oligonucleotide
  siRNAs to PCSK9
  modified_base (1)..(1): 2'-hydroxy corresponding base
  modified_base (2)..(2): 2'-hydroxy corresponding base
  modified_base (3)..(3): 2'-hydroxy corresponding base
  modified_base (4)..(4): 2'-hydroxy corresponding base
  modified_base (5)..(5): 2'-hydroxy corresponding base
  modified_base (6)..(6): 2'-hydroxy corresponding base
  modified_base (7)..(7): 2'-hydroxy corresponding base
  modified_base (8)..(8): 2'-hydroxy corresponding base
  modified_base (9)..(9): 2'-hydroxy corresponding base
  modified_base (10)..(10): 2'-hydroxy corresponding base
  modified_base (11)..(11): 2'-hydroxy corresponding base
  modified_base (12)..(12): 2'-hydroxy corresponding base
  modified_base (13)..(13): 2'-hydroxy corresponding base
  modified_base (14)..(14): 2'-hydroxy corresponding base
  modified_base (15)..(15): 2'-hydroxy corresponding base
  modified_base (16)..(16): 2'-hydroxy corresponding base
  modified_base (17)..(17): 2'-hydroxy corresponding base
  modified_base (18)..(18): 2'-hydroxy corresponding base
  modified_base (19)..(19): 2'-hydroxy corresponding base
  modified_base (20)..(20): deoxythymidine
  modified_base (21)..(21): 5'-thio thymidine
agacccaaaagauaaaugutt

SEQ ID NO: 1179 - DNA, 21 bp, Artificial Sequence
  Description of Artificial Sequence: Synthetic oligonucleotide
  Description of Combined DNA/RNA Molecule: Synthetic oligonucleotide
  siRNAs to PCSK9
  modified_base (1)..(1): 2'-hydroxy corresponding base
  modified_base (2)..(2): 2'-O-methyl corresponding base
  modified_base (3)..(3): 2'-hydroxy corresponding base
  modified_base (4)..(4): 2'-O-methyl corresponding base
  modified_base (5)..(5): 2'-O-methyl corresponding base
  modified_base (6)..(6): 2'-O-methyl corresponding base
  modified_base (7)..(7): 2'-hydroxy corresponding base
  modified_base (8)..(8): 2'-O-methyl corresponding base
  modified_base (9)..(9): 2'-O-methyl corresponding base
  modified_base (10)..(10): 2'-O-methyl corresponding base
  modified_base (11)..(11): 2'-O-methyl corresponding base
  modified_base (12)..(12): 2'-O-methyl corresponding base
  modified_base (13)..(13): 2'-O-methyl corresponding base
  modified_base (14)..(14): 2'-hydroxy corresponding base
  modified_base (15)..(15): 2'-hydroxy corresponding base
  modified_base (16)..(16): 2'-hydroxy corresponding base
  modified_base (17)..(17): 2'-O-methyl corresponding base
  modified_base (18)..(18): 2'-O-methyl corresponding base
  modified_base (19)..(19): 2'-O-methyl corresponding base
  modified_base (20)..(20): deoxythymidine
  modified_base (21)..(21): 5'-thio thymidine
acauuuaucuuuugggucutt

SEQ ID NO: 1180 - DNA, 21 bp, Artificial Sequence
  Description of Artificial Sequence: Synthetic oligonucleotide
  Description of Combined DNA/RNA Molecule: Synthetic oligonucleotide
  siRNAs to PCSK9
  modified_base (1)..(1): 2'-hydroxy corresponding base
  modified_base (2)..(2): 2'-hydroxy corresponding base
  modified_base (3)..(3): 2'-hydroxy corresponding base
  modified_base (4)..(4): 2'-hydroxy corresponding base
  modified_base (5)..(5): 2'-hydroxy corresponding base
  modified_base (6)..(6): 2'-O-methyl corresponding base
  modified_base (7)..(7): 2'-hydroxy corresponding base
  modified_base (8)..(8): 2'-hydroxy corresponding base
  modified_base (9)..(9): 2'-hydroxy corresponding base
  modified_base (10)..(10): 2'-hydroxy corresponding base
  modified_base (11)..(11): 2'-hydroxy corresponding base
  modified_base (12)..(12): 2'-hydroxy corresponding base
  modified_base (13)..(13): 2'-O-methyl corresponding base
  modified_base (14)..(14): 2'-hydroxy corresponding base
  modified_base (15)..(15): 2'-hydroxy corresponding base
  modified_base (16)..(16): 2'-hydroxy corresponding base
  modified_base (17)..(17): 2'-hydroxy corresponding base
  modified_base (18)..(18): 2'-hydroxy corresponding base
  modified_base (19)..(19): 2'-hydroxy corresponding base
  modified_base (20)..(20): deoxythymidine
  modified_base (21)..(21): 5'-thio thymidine
agacccaaaagauaaaugutt

SEQ ID NO: 1181 - DNA, 21 bp, Artificial Sequence
  Description of Artificial Sequence: Synthetic oligonucleotide
  Description of Combined DNA/RNA Molecule: Synthetic oligonucleotide
  siRNAs to PCSK9
  modified_base (1)..(1): 2'-deoxy-2'-fluoro corresponding base
  modified_base (2)..(2): 2'-O-methyl corresponding base
  modified_base (3)..(3): 2'-deoxy-2'-fluoro corresponding base
  modified_base (4)..(4): 2'-O-methyl corresponding base
  modified_base (5)..(5): 2'-deoxy-2'-fluoro corresponding base
  modified_base (6)..(6): 2'-O-methyl corresponding base
  modified_base (7)..(7): 2'-deoxy-2'-fluoro corresponding base
  modified_base (8)..(8): 2'-O-methyl corresponding base
  modified_base (9)..(9): 2'-deoxy-2'-fluoro corresponding base
  modified_base (10)..(10): 2'-O-methyl corresponding base
  modified_base (11)..(11): 2'-deoxy-2'-fluoro corresponding base
  modified_base (12)..(12): 2'-O-methyl corresponding base
  modified_base (13)..(13): 2'-deoxy-2'-fluoro corresponding base
  modified_base (14)..(14): 2'-O-methyl corresponding base
  modified_base (15)..(15): 2'-deoxy-2'-fluoro corresponding base
  modified_base (16)..(16): 2'-O-methyl corresponding base
  modified_base (17)..(17): 2'-deoxy-2'-fluoro corresponding base
  modified_base (18)..(18): 2'-O-methyl corresponding base
  modified_base (19)..(19): 2'-deoxy-2'-fluoro corresponding base
  modified_base (20)..(20): deoxythymidine
  modified_base (21)..(21): 5'-thio thymidine
acauuuaucuuuugggucutt

SEQ ID NO: 1182 - DNA, 21 bp, Artificial Sequence
  Description of Artificial Sequence: Synthetic oligonucleotide
  Description of Combined DNA/RNA Molecule: Synthetic oligonucleotide
  siRNAs to PCSK9
  modified_base (1)..(1): 2'-O-methyl corresponding base
  modified_base (2)..(2): 2'-deoxy-2'-fluoro corresponding base
  modified_base (3)..(3): 2'-O-methyl corresponding base
  modified_base (4)..(4): 2'-deoxy-2'-fluoro corresponding base
  modified_base (5)..(5): 2'-O-methyl corresponding base
  modified_base (6)..(6): 2'-deoxy-2'-fluoro corresponding base
  modified_base (7)..(7): 2'-O-methyl corresponding base
  modified_base (8)..(8): 2'-deoxy-2'-fluoro corresponding base
  modified_base (9)..(9): 2'-O-methyl corresponding base
  modified_base (10)..(10): 2'-deoxy-2'-fluoro corresponding base
  modified_base (11)..(11): 2'-O-methyl corresponding base
  modified_base (12)..(12): 2'-deoxy-2'-fluoro corresponding base
  modified_base (13)..(13): 2'-O-methyl corresponding base
  modified_base (14)..(14): 2'-deoxy-2'-fluoro corresponding base
  modified_base (15)..(15): 2'-O-methyl corresponding base
  modified_base (16)..(16): 2'-deoxy-2'-fluoro corresponding base
  modified_base (17)..(17): 2'-O-methyl corresponding base
  modified_base (18)..(18): 2'-deoxy-2'-fluoro corresponding base
  modified_base (19)..(19): 2'-O-methyl corresponding base
  modified_base (20)..(20): deoxythymidine
  modified_base (21)..(21): 5'-thio thymidine
agacccaaaagauaaaugutt

SEQ ID NO: 1183 - DNA, 21 bp, Artificial Sequence
  Description of Artificial Sequence: Synthetic oligonucleotide
  Description of Combined DNA/RNA Molecule: Synthetic oligonucleotide
  siRNAs to PCSK9
  modified_base (1)..(1): 2'-hydroxy corresponding base
  modified_base (2)..(2): 2'-deoxy-2'-fluoro corresponding base
  modified_base (3)..(3): 2'-hydroxy corresponding base
  modified_base (4)..(4): 2'-deoxy-2'-fluoro corresponding base
  modified_base (5)..(5): 2'-deoxy-2'-fluoro corresponding base
  modified_base (6)..(6): 2'-deoxy-2'-fluoro corresponding base
  modified_base (7)..(7): 2'-hydroxy corresponding base
  modified_base (8)..(8): 2'-deoxy-2'-fluoro corresponding base
  modified_base (9)..(9): 2'-deoxy-2'-fluoro corresponding base
  modified_base (10)..(10): 2'-deoxy-2'-fluoro corresponding base
  modified_base (11)..(11): 2'-deoxy-2'-fluoro corresponding base
  modified_base (12)..(12): 2'-deoxy-2'-fluoro corresponding base
  modified_base (13)..(13): 2'-deoxy-2'-fluoro corresponding base
  modified_base (14)..(14): 2'-hydroxy corresponding base
  modified_base (15)..(15): 2'-hydroxy corresponding base
  modified_base (16)..(16): 2'-hydroxy corresponding base
  modified_base (17)..(17): 2'-deoxy-2'-fluoro corresponding base
  modified_base (18)..(18): 2'-deoxy-2'-fluoro corresponding base
  modified_base (19)..(19): 2'-deoxy-2'-fluoro corresponding base
  modified_base (20)..(20): deoxythymidine
  modified_base (21)..(21): 5'-thio thymidine
acauuuaucuuuugggucutt

SEQ ID NO: 1184 - DNA, 21 bp, Artificial Sequence
  Description of Artificial Sequence: Synthetic oligonucleotide
  Description of Combined DNA/RNA Molecule: Synthetic oligonucleotide
  siRNAs to PCSK9
  modified_base (1)..(1): 2'-hydroxy corresponding base
  modified_base (2)..(2): 2'-hydroxy corresponding base
  modified_base (3)..(3): 2'-hydroxy corresponding base
  modified_base (4)..(4): 2'-deoxy-2'-fluoro corresponding base
  modified_base (5)..(5): 2'-deoxy-2'-fluoro corresponding base
  modified_base (6)..(6): 2'-deoxy-2'-fluoro corresponding base
  modified_base (7)..(7): 2'-hydroxy corresponding base
  modified_base (8)..(8): 2'-hydroxy corresponding base
  modified_base (9)..(9): 2'-hydroxy corresponding base
  modified_base (10)..(10): 2'-hydroxy corresponding base
  modified_base (11)..(11): 2'-hydroxy corresponding base
  modified_base (12)..(12): 2'-hydroxy corresponding base
  modified_base (13)..(13): 2'-deoxy-2'-fluoro corresponding base
  modified_base (14)..(14): 2'-hydroxy corresponding base
  modified_base (15)..(15): 2'-hydroxy corresponding base
  modified_base (16)..(16): 2'-hydroxy corresponding base
  modified_base (17)..(17): 2'-deoxy-2'-fluoro corresponding base
  modified_base (18)..(18): 2'-hydroxy corresponding base
  modified_base (19)..(19): 2'-deoxy-2'-fluoro corresponding base
  modified_base (20)..(20): deoxythymidine
  modified_base (21)..(21): 5'-thio thymidine
agacccaaaagauaaaugutt

SEQ ID NO: 1185 - DNA, 21 bp, Artificial Sequence
  Description of Artificial Sequence: Synthetic oligonucleotide
  Description of Combined DNA/RNA Molecule: Synthetic oligonucleotide
  siRNAs to PCSK9
  modified_base (1)..(1): 2'-hydroxy corresponding base
  modified_base (2)..(2): 2'-O-methyl corresponding base
  modified_base (3)..(3): 2'-hydroxy corresponding base
  modified_base (4)..(4): 2'-O-methyl corresponding base
  modified_base (5)..(5): 2'-hydroxy corresponding base
  modified_base (6)..(6): 2'-O-methyl corresponding base
  modified_base (7)..(7): 2'-hydroxy corresponding base
  modified_base (8)..(8): 2'-O-methyl corresponding base
  modified_base (9)..(9): 2'-hydroxy corresponding base
  modified_base (10)..(10): 2'-O-methyl corresponding base
  modified_base (11)..(11): 2'-hydroxy corresponding base
  modified_base (12)..(12): 2'-O-methyl corresponding base
  modified_base (13)..(13): 2'-hydroxy corresponding base
  modified_base (14)..(14): 2'-O-methyl corresponding base
  modified_base (15)..(15): 2'-hydroxy corresponding base
  modified_base (16)..(16): 2'-O-methyl corresponding base
  modified_base (17)..(17): 2'-hydroxy corresponding base
  modified_base (18)..(18): 2'-O-methyl corresponding base
  modified_base (19)..(19): 2'-hydroxy corresponding base
  modified_base (20)..(20): deoxythymidine
  modified_base (21)..(21): 5'-thio thymidine
acauuuaucuuuugggucutt

SEQ ID NO: 1186 - DNA, 21 bp, Artificial Sequence
  Description of Artificial Sequence: Synthetic oligonucleotide
  Description of Combined DNA/RNA Molecule: Synthetic oligonucleotide
  siRNAs to PCSK9
  modified_base (1)..(1): 2'-O-methyl corresponding base
  modified_base (2)..(2): 2'-deoxy-2'-fluoro corresponding base
  modified_base (3)..(3): 2'-O-methyl corresponding base
  modified_base (4)..(4): 2'-deoxy-2'-fluoro corresponding base
  modified_base (5)..(5): 2'-O-methyl corresponding base
  modified_base (6)..(6): 2'-deoxy-2'-fluoro corresponding base
  modified_base (7)..(7): 2'-O-methyl corresponding base
  modified_base (8)..(8): 2'-deoxy-2'-fluoro corresponding base
  modified_base (9)..(9): 2'-O-methyl corresponding base
  modified_base (10)..(10): 2'-deoxy-2'-fluoro corresponding base
  modified_base (11)..(11): 2'-O-methyl corresponding base
  modified_base (12)..(12): 2'-deoxy-2'-fluoro corresponding base
  modified_base (13)..(13): 2'-O-methyl corresponding base
  modified_base (14)..(14): 2'-deoxy-2'-fluoro corresponding base
  modified_base (15)..(15): 2'-O-methyl corresponding base
  modified_base (16)..(16): 2'-deoxy-2'-fluoro corresponding base
  modified_base (17)..(17): 2'-O-methyl corresponding base
  modified_base (18)..(18): 2'-deoxy-2'-fluoro corresponding base
  modified_base (19)..(19): 2'-O-methyl corresponding base
  modified_base (20)..(20): deoxythymidine
  modified_base (21)..(21): 5'-thio thymidine
agacccaaaagauaaaugutt

SEQ ID NO: 1187 - DNA, 21 bp, Artificial Sequence
  Description of Artificial Sequence: Synthetic oligonucleotide
  Description of Combined DNA/RNA Molecule: Synthetic oligonucleotide
  siRNAs to PCSK9
  modified_base (1)..(1): 2'-hydroxy corresponding base
  modified_base (2)..(2): 2'-O-methyl corresponding base
  modified_base (3)..(3): 2'-hydroxy corresponding base
  modified_base (4)..(4): 2'-O-methyl corresponding base
  modified_base (5)..(5): 2'-hydroxy corresponding base
  modified_base (6)..(6): 2'-O-methyl corresponding base
  modified_base (7)..(7): 2'-hydroxy corresponding base
  modified_base (8)..(8): 2'-O-methyl corresponding base
  modified_base (9)..(9): 2'-hydroxy corresponding base
  modified_base (10)..(10): 2'-O-methyl corresponding base
  modified_base (11)..(11): 2'-hydroxy corresponding base
  modified_base (12)..(12): 2'-O-methyl corresponding base
  modified_base (13)..(13): 2'-hydroxy corresponding base
  modified_base (14)..(14): 2'-O-methyl corresponding base
  modified_base (15)..(15): 2'-hydroxy corresponding base
  modified_base (16)..(16): 2'-O-methyl corresponding base
  modified_base (17)..(17): 2'-hydroxy corresponding base
  modified_base (18)..(18): 2'-O-methyl corresponding base
  modified_base (19)..(19): 2'-hydroxy corresponding base
  modified_base (20)..(20): deoxythymidine
  modified_base (21)..(21): 5'-thio thymidine
acauuuaucuuuugggucutt

SEQ ID NO: 1188 - DNA, 21 bp, Artificial Sequence
  Description of Artificial Sequence: Synthetic oligonucleotide
  Description of Combined DNA/RNA Molecule: Synthetic oligonucleotide
  siRNAs to PCSK9
  modified_base (1)..(1): 2'-hydroxy corresponding base
  modified_base (2)..(2): 2'-hydroxy corresponding base
  modified_base (3)..(3): 2'-hydroxy corresponding base
  modified_base (4)..(4): 2'-deoxy-2'-fluoro corresponding base
  modified_base (5)..(5): 2'-deoxy-2'-fluoro corresponding base
  modified_base (6)..(6): 2'-deoxy-2'-fluoro corresponding base
  modified_base (7)..(7): 2'-hydroxy corresponding base
  modified_base (8)..(8): 2'-hydroxy corresponding base
  modified_base (9)..(9): 2'-hydroxy corresponding base
  modified_base (10)..(10): 2'-hydroxy corresponding base
  modified_base (11)..(11): 2'-hydroxy corresponding base
  modified_base (12)..(12): 2'-hydroxy corresponding base
  modified_base (13)..(13): 2'-deoxy-2'-fluoro corresponding base
  modified_base (14)..(14): 2'-hydroxy corresponding base
  modified_base (15)..(15): 2'-hydroxy corresponding base
  modified_base (16)..(16): 2'-hydroxy corresponding base
  modified_base (17)..(17): 2'-deoxy-2'-fluoro corresponding base
  modified_base (18)..(18): 2'-hydroxy corresponding base
  modified_base (19)..(19): 2'-deoxy-2'-fluoro corresponding base
  modified_base (20)..(20): deoxythymidine
  modified_base (21)..(21): 5'-thio thymidine
agacccaaaagauaaaugutt

SEQ ID NO: 1189 - DNA, 21 bp, Artificial Sequence
  Description of Artificial Sequence: Synthetic oligonucleotide
  Description of Combined DNA/RNA Molecule: Synthetic oligonucleotide
  siRNAs to PCSK9
  modified_base (1)..(1): 2'-deoxy-2'-fluoro corresponding base
  modified_base (2)..(2): 2'-O-methyl corresponding base
  modified_base (3)..(3): 2'-deoxy-2'-fluoro corresponding base
  modified_base (4)..(4): 2'-O-methyl corresponding base
  modified_base (5)..(5): 2'-deoxy-2'-fluoro corresponding base
  modified_base (6)..(6): 2'-O-methyl corresponding base
  modified_base (7)..(7): 2'-deoxy-2'-fluoro corresponding base
  modified_base (8)..(8): 2'-O-methyl corresponding base
  modified_base (9)..(9): 2'-deoxy-2'-fluoro corresponding base
  modified_base (10)..(10): 2'-O-methyl corresponding base
  modified_base (11)..(11): 2'-deoxy-2'-fluoro corresponding base
  modified_base (12)..(12): 2'-O-methyl corresponding base
  modified_base (13)..(13): 2'-deoxy-2'-fluoro corresponding base
  modified_base (14)..(14): 2'-O-methyl corresponding base
  modified_base (15)..(15): 2'-deoxy-2'-fluoro corresponding base
  modified_base (16)..(16): 2'-O-methyl corresponding base
  modified_base (17)..(17): 2'-deoxy-2'-fluoro corresponding base
  modified_base (18)..(18): 2'-O-methyl corresponding base
  modified_base (19)..(19): 2'-deoxy-2'-fluoro corresponding base
  modified_base (20)..(20): deoxythymidine
  modified_base (21)..(21): 5'-thio thymidine
acauuuaucuuuugggucutt

SEQ ID NO: 1190 - DNA, 21 bp, Artificial Sequence
  Description of Artificial Sequence: Synthetic oligonucleotide
  Description of Combined DNA/RNA Molecule: Synthetic oligonucleotide
  siRNAs to PCSK9
  modified_base (1)..(1): 2'-hydroxy corresponding base
  modified_base (2)..(2): 2'-hydroxy corresponding base
  modified_base (3)..(3): 2'-hydroxy corresponding base
  modified_base (4)..(4): 2'-hydroxy corresponding base
  modified_base (5)..(5): 2'-hydroxy corresponding base
  modified_base (6)..(6): 2'-O-methyl corresponding base
  modified_base (7)..(7): 2'-O-methyl corresponding base
  modified_base (8)..(8): 2'-hydroxy corresponding base
  modified_base (9)..(9): 2'-hydroxy corresponding base
  modified_base (10)..(10): 2'-O-methyl corresponding base
  modified_base (11)..(11): 2'-O-methyl corresponding base
  modified_base (12)..(12): 2'-hydroxy corresponding base
  modified_base (13)..(13): 2'-hydroxy corresponding base
  modified_base (14)..(14): 2'-hydroxy corresponding base
  modified_base (15)..(15): 2'-hydroxy corresponding base
  modified_base (16)..(16): 2'-hydroxy corresponding base
  modified_base (17)..(17): 2'-O-methyl corresponding base
  modified_base (18)..(18): 2'-O-methyl corresponding base
  modified_base (19)..(19): 2'-O-methyl corresponding base
  modified_base (20)..(20): deoxythymidine
  modified_base (21)..(21): 5'-thio thymidine
agacccaaaagauaaaugutt

SEQ ID NO: 1191 - DNA, 21 bp, Artificial Sequence
  Description of Artificial Sequence: Synthetic oligonucleotide
  Description of Combined DNA/RNA Molecule: Synthetic oligonucleotide
  siRNAs to PCSK9
  modified_base (1)..(1): 2'-hydroxy corresponding base
  modified_base (2)..(2): 2'-deoxy-2'-fluoro corresponding base
  modified_base (3)..(3): 2'-hydroxy corresponding base
  modified_base (4)..(4): 2'-deoxy-2'-fluoro corresponding base
  modified_base (5)..(5): 2'-deoxy-2'-fluoro corresponding base
  modified_base (6)..(6): 2'-deoxy-2'-fluoro corresponding base
  modified_base (7)..(7): 2'-hydroxy corresponding base
  modified_base (8)..(8): 2'-deoxy-2'-fluoro corresponding base
  modified_base (9)..(9): 2'-deoxy-2'-fluoro corresponding base
  modified_base (10)..(10): 2'-deoxy-2'-fluoro corresponding base
  modified_base (11)..(11): 2'-deoxy-2'-fluoro corresponding base
  modified_base (12)..(12): 2'-deoxy-2'-fluoro corresponding base
  modified_base (13)..(13): 2'-deoxy-2'-fluoro corresponding base
  modified_base (14)..(14): 2'-hydroxy corresponding base
  modified_base (15)..(15): 2'-hydroxy corresponding base
  modified_base (16)..(16): 2'-hydroxy corresponding base
  modified_base (17)..(17): 2'-deoxy-2'-fluoro corresponding base
  modified_base (18)..(18): 2'-deoxy-2'-fluoro corresponding base
  modified_base (19)..(19): 2'-deoxy-2'-fluoro corresponding base
  modified_base (20)..(20): deoxythymidine
  modified_base (21)..(21): 5'-thio thymidine
acauuuaucuuuugggucutt

SEQ ID NO: 1192 - DNA, 21 bp, Artificial Sequence
  Description of Artificial Sequence: Synthetic oligonucleotide
  Description of Combined DNA/RNA Molecule: Synthetic oligonucleotide
  siRNAs to PCSK9
  modified_base (1)..(1): 2'-hydroxy corresponding base
  modified_base (2)..(2): 2'-hydroxy corresponding base
  modified_base (3)..(3): 2'-hydroxy corresponding base
  modified_base (4)..(4): 2'-hydroxy corresponding base
  modified_base (5)..(5): 2'-hydroxy corresponding base
  modified_base (6)..(6): 2'-O-methyl corresponding base
  modified_base (7)..(7): 2'-O-methyl corresponding base
  modified_base (8)..(8): 2'-hydroxy corresponding base
  modified_base (9)..(9): 2'-hydroxy corresponding base
  modified_base (10)..(10): 2'-O-methyl corresponding base
  modified_base (11)..(11): 2'-O-methyl corresponding base
  modified_base (12)..(12): 2'-hydroxy corresponding base
  modified_base (13)..(13): 2'-hydroxy corresponding base
  modified_base (14)..(14): 2'-hydroxy corresponding base
  modified_base (15)..(15): 2'-hydroxy corresponding base
  modified_base (16)..(16): 2'-hydroxy corresponding base
  modified_base (17)..(17): 2'-O-methyl corresponding base
  modified_base (18)..(18): 2'-O-methyl corresponding base
  modified_base (19)..(19): 2'-O-methyl corresponding base
  modified_base (20)..(20): deoxythymidine
  modified_base (21)..(21): 5'-thio thymidine
agacccaaaagauaaaugutt

SEQ ID NO: 1193 - DNA, 21 bp, Artificial Sequence
  Description of Artificial Sequence: Synthetic oligonucleotide
  Description of Combined DNA/RNA Molecule: Synthetic oligonucleotide
  siRNAs to PCSK9
  modified_base (1)..(1): 2'-hydroxy corresponding base
  modified_base (2)..(2): 2'-O-methyl corresponding base
  modified_base (3)..(3): 2'-hydroxy corresponding base
  modified_base (4)..(4): 2'-O-methyl corresponding base
  modified_base (5)..(5): 2'-hydroxy corresponding base
  modified_base (6)..(6): 2'-O-methyl corresponding base
  modified_base (7)..(7): 2'-hydroxy corresponding base
  modified_base (8)..(8): 2'-O-methyl corresponding base
  modified_base (9)..(9): 2'-hydroxy corresponding base
  modified_base (10)..(10): 2'-O-methyl corresponding base
  modified_base (11)..(11): 2'-hydroxy corresponding base
  modified_base (12)..(12): 2'-O-methyl corresponding base
  modified_base (13)..(13): 2'-hydroxy corresponding base
  modified_base (14)..(14): 2'-O-methyl corresponding base
  modified_base (15)..(15): 2'-hydroxy corresponding base
  modified_base (16)..(16): 2'-O-methyl corresponding base
  modified_base (17)..(17): 2'-hydroxy corresponding base
  modified_base (18)..(18): 2'-O-methyl corresponding base
  modified_base (19)..(19): 2'-hydroxy corresponding base
  modified_base (20)..(20): deoxythymidine
  modified_base (21)..(21): 5'-thio thymidine
acauuuaucuuuugggucutt

SEQ ID NO: 1194 - DNA, 21 bp, Artificial Sequence
  Description of Artificial Sequence: Synthetic oligonucleotide
  Description of Combined DNA/RNA Molecule: Synthetic oligonucleotide
  siRNAs to PCSK9
  modified_base (1)..(1): 2'-hydroxy corresponding base
  modified_base (2)..(2): 2'-hydroxy corresponding base
  modified_base (3)..(3): 2'-hydroxy corresponding base
  modified_base (4)..(4): 2'-hydroxy corresponding base
  modified_base (5)..(5): 2'-hydroxy corresponding base
  modified_base (6)..(6): 2'-O-methyl corresponding base
  modified_base (7)..(7): 2'-O-methyl corresponding base
  modified_base (8)..(8): 2'-hydroxy corresponding base
  modified_base (9)..(9): 2'-hydroxy corresponding base
  modified_base (10)..(10): 2'-O-methyl corresponding base
  modified_base (11)..(11): 2'-O-methyl corresponding base
  modified_base (12)..(12): 2'-hydroxy corresponding base
  modified_base (13)..(13): 2'-hydroxy corresponding base
  modified_base (14)..(14): 2'-hydroxy corresponding base
  modified_base (15)..(15): 2'-hydroxy corresponding base
  modified_base (16)..(16): 2'-hydroxy corresponding base
  modified_base (17)..(17): 2'-O-methyl corresponding base
  modified_base (18)..(18): 2'-O-methyl corresponding base
  modified_base (19)..(19): 2'-O-methyl corresponding base
  modified_base (20)..(20): deoxythymidine
  modified_base (21)..(21): 5'-thio thymidine
agacccaaaagauaaaugutt

SEQ ID NO: 1195 - DNA, 21 bp, Artificial Sequence
  Description of Artificial Sequence: Synthetic oligonucleotide
  Description of Combined DNA/RNA Molecule: Synthetic oligonucleotide
  siRNAs to PCSK9
  modified_base (1)..(1): 2'-deoxy-2'-fluoro corresponding base
  modified_base (2)..(2): 2'-O-methyl corresponding base
  modified_base (3)..(3): 2'-deoxy-2'-fluoro corresponding base
  modified_base (4)..(4): 2'-O-methyl corresponding base
  modified_base (5)..(5): 2'-deoxy-2'-fluoro corresponding base
  modified_base (6)..(6): 2'-O-methyl corresponding base
  modified_base (7)..(7): 2'-deoxy-2'-fluoro corresponding base
  modified_base (8)..(8): 2'-O-methyl corresponding base
  modified_base (9)..(9): 2'-deoxy-2'-fluoro corresponding base
  modified_base (10)..(10): 2'-O-methyl corresponding base
  modified_base (11)..(11): 2'-deoxy-2'-fluoro corresponding base
  modified_base (12)..(12): 2'-O-methyl corresponding base
  modified_base (13)..(13): 2'-deoxy-2'-fluoro corresponding base
  modified_base (14)..(14): 2'-O-methyl corresponding base
  modified_base (15)..(15): 2'-deoxy-2'-fluoro corresponding base
  modified_base (16)..(16): 2'-O-methyl corresponding base
  modified_base (17)..(17): 2'-deoxy-2'-fluoro corresponding base
  modified_base (18)..(18): 2'-O-methyl corresponding base
  modified_base (19)..(19): 2'-deoxy-2'-fluoro corresponding base
  modified_base (20)..(20): deoxythymidine
  modified_base (21)..(21): 5'-thio thymidine
gccaucugcugccggagcctt

SEQ ID NO: 1196 - DNA, 21 bp, Artificial Sequence
  Description of Artificial Sequence: Synthetic oligonucleotide
  Description of Combined DNA/RNA Molecule: Synthetic oligonucleotide
  siRNAs to PCSK9
  modified_base (1)..(1): 2'-O-methyl corresponding base
  modified_base (2)..(2): 2'-deoxy-2'-fluoro corresponding base
  modified_base (3)..(3): 2'-O-methyl corresponding base
  modified_base (4)..(4): 2'-deoxy-2'-fluoro corresponding base
  modified_base (5)..(5): 2'-O-methyl corresponding base
  modified_base (6)..(6): 2'-deoxy-2'-fluoro corresponding base
  modified_base (7)..(7): 2'-O-methyl corresponding base
  modified_base (8)..(8): 2'-deoxy-2'-fluoro corresponding base
  modified_base (9)..(9): 2'-O-methyl corresponding base
  modified_base (10)..(10): 2'-deoxy-2'-fluoro corresponding base
  modified_base (11)..(11): 2'-O-methyl corresponding base
  modified_base (12)..(12): 2'-deoxy-2'-fluoro corresponding base
  modified_base (13)..(13): 2'-O-methyl corresponding base
  modified_base (14)..(14): 2'-deoxy-2'-fluoro corresponding base
  modified_base (15)..(15): 2'-O-methyl corresponding base
  modified_base (16)..(16): 2'-deoxy-2'-fluoro corresponding base
  modified_base (17)..(17): 2'-O-methyl corresponding base
  modified_base (18)..(18): 2'-deoxy-2'-fluoro corresponding base
  modified_base (19)..(19): 2'-O-methyl corresponding base
  modified_base (20)..(20): deoxythymidine
  modified_base (21)..(21): 5'-thio thymidine
ggcuccggcagcagauggctt

SEQ ID NO: 1197 - DNA, 21 bp, Artificial Sequence
  Description of Artificial Sequence: Synthetic oligonucleotide
  Description of Combined DNA/RNA Molecule: Synthetic oligonucleotide
  siRNAs to PCSK9
  modified_base (1)..(1): 2'-hydroxy corresponding base
  modified_base (2)..(2): 2'-deoxy-2'-fluoro corresponding base
  modified_base (3)..(3): 2'-deoxy-2'-fluoro corresponding base
  modified_base (4)..(4): 2'-hydroxy corresponding base
  modified_base (5)..(5): 2'-deoxy-2'-fluoro corresponding base
  modified_base (6)..(6): 2'-deoxy-2'-fluoro corresponding base
  modified_base (7)..(7): 2'-deoxy-2'-fluoro corresponding base
  modified_base (8)..(8): 2'-hydroxy corresponding base
  modified_base (9)..(9): 2'-deoxy-2'-fluoro corresponding base
  modified_base (10)..(10): 2'-deoxy-2'-fluoro corresponding base
  modified_base (11)..(11): 2'-hydroxy corresponding base
  modified_base (12)..(12): 2'-deoxy-2'-fluoro corresponding base
  modified_base (13)..(13): 2'-deoxy-2'-fluoro corresponding base
  modified_base (14)..(14): 2'-hydroxy corresponding base
  modified_base (15)..(15): 2'-hydroxy corresponding base
  modified_base (16)..(16): 2'-hydroxy corresponding base
  modified_base (17)..(17): 2'-hydroxy corresponding base
  modified_base (18)..(18): 2'-deoxy-2'-fluoro corresponding base
  modified_base (19)..(19): 2'-deoxy-2'-fluoro corresponding base
  modified_base (20)..(20): deoxythymidine
  modified_base (21)..(21): 5'-thio thymidine
gccaucugcugccggagcctt

SEQ ID NO: 1198 - DNA, 21 bp, Artificial Sequence
  Description of Artificial Sequence: Synthetic oligonucleotide
  Description of Combined DNA/RNA Molecule: Synthetic oligonucleotide
  siRNAs to PCSK9
  modified_base (1)..(1): 2'-hydroxy corresponding base
  modified_base (2)..(2): 2'-hydroxy corresponding base
  modified_base (3)..(3): 2'-deoxy-2'-fluoro corresponding base
  modified_base (4)..(4): 2'-deoxy-2'-fluoro corresponding base
  modified_base (5)..(5): 2'-deoxy-2'-fluoro corresponding base
  modified_base (6)..(6): 2'-deoxy-2'-fluoro corresponding base
  modified_base (7)..(7): 2'-hydroxy corresponding base
  modified_base (8)..(8): 2'-hydroxy corresponding base
  modified_base (9)..(9): 2'-deoxy-2'-fluoro corresponding base
  modified_base (10)..(10): 2'-hydroxy corresponding base
  modified_base (11)..(11): 2'-hydroxy corresponding base
  modified_base (12)..(12): 2'-deoxy-2'-fluoro corresponding base
  modified_base (13)..(13): 2'-hydroxy corresponding base
  modified_base (14)..(14): 2'-hydroxy corresponding base
  modified_base (15)..(15): 2'-hydroxy corresponding base
  modified_base (16)..(16): 2'-deoxy-2'-fluoro corresponding base
  modified_base (17)..(17): 2'-hydroxy corresponding base
  modified_base (18)..(18): 2'-hydroxy corresponding base
  modified_base (19)..(19): 2'-deoxy-2'-fluoro corresponding base
  modified_base (20)..(20): deoxythymidine
  modified_base (21)..(21): 5'-thio thymidine
ggcuccggcagcagauggctt

SEQ ID NO: 1199 - DNA, 21 bp, Artificial Sequence
  Description of Artificial Sequence: Synthetic oligonucleotide
  Description of Combined DNA/RNA Molecule: Synthetic oligonucleotide
  siRNAs to PCSK9
  modified_base (1)..(1): 2'-hydroxy corresponding base
  modified_base (2)..(2): 2'-O-methyl corresponding base
  modified_base (3)..(3): 2'-hydroxy corresponding base
  modified_base (4)..(4): 2'-O-methyl corresponding base
  modified_base (5)..(5): 2'-hydroxy corresponding base
  modified_base (6)..(6): 2'-O-methyl corresponding base
  modified_base (7)..(7): 2'-hydroxy corresponding base
  modified_base (8)..(8): 2'-O-methyl corresponding base
  modified_base (9)..(9): 2'-hydroxy corresponding base
  modified_base (10)..(10): 2'-O-methyl corresponding base
  modified_base (11)..(11): 2'-hydroxy corresponding base
  modified_base (12)..(12): 2'-O-methyl corresponding base
  modified_base (13)..(13): 2'-hydroxy corresponding base
  modified_base (14)..(14): 2'-O-methyl corresponding base
  modified_base (15)..(15): 2'-hydroxy corresponding base
  modified_base (16)..(16): 2'-O-methyl corresponding base
  modified_base (17)..(17): 2'-hydroxy corresponding base
  modified_base (18)..(18): 2'-O-methyl corresponding base
  modified_base (19)..(19): 2'-hydroxy corresponding base
  modified_base (20)..(20): deoxythymidine
  modified_base (21)..(21): 5'-thio thymidine
gccaucugcugccggagcctt

SEQ ID NO: 1200 - DNA, 21 bp, Artificial Sequence
  Description of Artificial Sequence: Synthetic oligonucleotide
  Description of Combined DNA/RNA Molecule: Synthetic oligonucleotide
  siRNAs to PCSK9
  modified_base (1)..(1): 2'-O-methyl corresponding base
  modified_base (2)..(2): 2'-deoxy-2'-fluoro corresponding base
  modified_base (3)..(3): 2'-O-methyl corresponding base
  modified_base (4)..(4): 2'-deoxy-2'-fluoro corresponding base
  modified_base (5)..(5): 2'-O-methyl corresponding base
  modified_base (6)..(6): 2'-deoxy-2'-fluoro corresponding base
  modified_base (7)..(7): 2'-O-methyl corresponding base
  modified_base (8)..(8): 2'-deoxy-2'-fluoro corresponding base
  modified_base (9)..(9): 2'-O-methyl corresponding base
  modified_base (10)..(10): 2'-deoxy-2'-fluoro corresponding base
  modified_base (11)..(11): 2'-O-methyl corresponding base
  modified_base (12)..(12): 2'-deoxy-2'-fluoro corresponding base
  modified_base (13)..(13): 2'-O-methyl corresponding base
  modified_base (14)..(14): 2'-deoxy-2'-fluoro corresponding base
  modified_base (15)..(15): 2'-O-methyl corresponding base
  modified_base (16)..(16): 2'-deoxy-2'-fluoro corresponding base
  modified_base (17)..(17): 2'-O-methyl corresponding base
  modified_base (18)..(18): 2'-deoxy-2'-fluoro corresponding base
  modified_base (19)..(19): 2'-O-methyl corresponding base
  modified_base (20)..(20): deoxythymidine
  modified_base (21)..(21): 5'-thio thymidine
ggcuccggcagcagauggctt

SEQ ID NO: 1201 - DNA, 21 bp, Artificial Sequence
  Description of Artificial Sequence: Synthetic oligonucleotide
  Description of Combined DNA/RNA Molecule: Synthetic oligonucleotide
  siRNAs to PCSK9
  modified_base (1)..(1): 2'-hydroxy corresponding base
  modified_base (2)..(2): 2'-O-methyl corresponding base
  modified_base (3)..(3): 2'-hydroxy corresponding base
  modified_base (4)..(4): 2'-O-methyl corresponding base
  modified_base (5)..(5): 2'-hydroxy corresponding base
  modified_base (6)..(6): 2'-O-methyl corresponding base
  modified_base (7)..(7): 2'-hydroxy corresponding base
  modified_base (8)..(8): 2'-O-methyl corresponding base
  modified_base (9)..(9): 2'-hydroxy corresponding base
  modified_base (10)..(10): 2'-O-methyl corresponding base
  modified_base (11)..(11): 2'-hydroxy corresponding base
  modified_base (12)..(12): 2'-O-methyl corresponding base
  modified_base (13)..(13): 2'-hydroxy corresponding base
  modified_base (14)..(14): 2'-O-methyl corresponding base
  modified_base (15)..(15): 2'-hydroxy corresponding base
  modified_base (16)..(16): 2'-O-methyl corresponding base
  modified_base (17)..(17): 2'-hydroxy corresponding base
  modified_base (18)..(18): 2'-O-methyl corresponding base
  modified_base (19)..(19): 2'-hydroxy corresponding base
  modified_base (20)..(20): deoxythymidine
  modified_base (21)..(21): 5'-thio thymidine
gccaucugcugccggagcctt

SEQ ID NO: 1202 - DNA, 21 bp, Artificial Sequence
  Description of Artificial Sequence: Synthetic oligonucleotide
  Description of Combined DNA/RNA Molecule: Synthetic oligonucleotide
  siRNAs to PCSK9
  modified_base (1)..(1): 2'-hydroxy corresponding base
  modified_base (2)..(2): 2'-hydroxy corresponding base
  modified_base (3)..(3): 2'-deoxy-2'-fluoro corresponding base
  modified_base (4)..(4): 2'-deoxy-2'-fluoro corresponding base
  modified_base (5)..(5): 2'-deoxy-2'-fluoro corresponding base
  modified_base (6)..(6): 2'-deoxy-2'-fluoro corresponding base
  modified_base (7)..(7): 2'-hydroxy corresponding base
  modified_base (8)..(8): 2'-hydroxy corresponding base
  modified_base (9)..(9): 2'-deoxy-2'-fluoro corresponding base
  modified_base (10)..(10): 2'-hydroxy corresponding base
  modified_base (11)..(11): 2'-hydroxy corresponding base
  modified_base (12)..(12): 2'-deoxy-2'-fluoro corresponding base
  modified_base (13)..(13): 2'-hydroxy corresponding base
  modified_base (14)..(14): 2'-hydroxy corresponding base
  modified_base (15)..(15): 2'-hydroxy corresponding base
  modified_base (16)..(16): 2'-deoxy-2'-fluoro corresponding base
  modified_base (17)..(17): 2'-hydroxy corresponding base
  modified_base (18)..(18): 2'-hydroxy corresponding base
  modified_base (19)..(19): 2'-deoxy-2'-fluoro corresponding base
  modified_base (20)..(20): deoxythymidine
  modified_base (21)..(21): 5'-thio thymidine
ggcuccggcagcagauggctt

SEQ ID NO: 1203 - DNA, 21 bp, Artificial Sequence
  Description of Artificial Sequence: Synthetic oligonucleotide
  Description of Combined DNA/RNA Molecule: Synthetic oligonucleotide
  siRNAs to PCSK9
  modified_base (1)..(1): 2'-deoxy-2'-fluoro corresponding base
  modified_base (2)..(2): 2'-O-methyl corresponding base
  modified_base (3)..(3): 2'-deoxy-2'-fluoro corresponding base
  modified_base (4)..(4): 2'-O-methyl corresponding base
  modified_base (5)..(5): 2'-deoxy-2'-fluoro corresponding base
  modified_base (6)..(6): 2'-O-methyl corresponding base
  modified_base (7)..(7): 2'-deoxy-2'-fluoro corresponding base
  modified_base (8)..(8): 2'-O-methyl corresponding base
  modified_base (9)..(9): 2'-deoxy-2'-fluoro corresponding base
  modified_base (10)..(10): 2'-O-methyl corresponding base
  modified_base (11)..(11): 2'-deoxy-2'-fluoro corresponding base
  modified_base (12)..(12): 2'-O-methyl corresponding base
  modified_base (13)..(13): 2'-deoxy-2'-fluoro corresponding base
  modified_base (14)..(14): 2'-O-methyl corresponding base
  modified_base (15)..(15): 2'-deoxy-2'-fluoro corresponding base
  modified_base (16)..(16): 2'-O-methyl corresponding base
  modified_base (17)..(17): 2'-deoxy-2'-fluoro corresponding base
  modified_base (18)..(18): 2'-O-methyl corresponding base
  modified_base (19)..(19): 2'-deoxy-2'-fluoro corresponding base
  modified_base (20)..(20): deoxythymidine
  modified_base (21)..(21): 5'-thio thymidine
gccaucugcugccggagcctt

SEQ ID NO: 1204 - DNA, 21 bp, Artificial Sequence
  Description of Artificial Sequence: Synthetic oligonucleotide
  Description of Combined DNA/RNA Molecule: Synthetic oligonucleotide
  siRNAs to PCSK9
  modified_base (1)..(1): 2'-hydroxy corresponding base
  modified_base (2)..(2): 2'-hydroxy corresponding base
  modified_base (3)..(3): 2'-hydroxy corresponding base
  modified_base (4)..(4): 2'-hydroxy corresponding base
  modified_base (5)..(5): 2'-hydroxy corresponding base
  modified_base (6)..(6): 2'-O-methyl corresponding base
  modified_base (7)..(7): 2'-O-methyl corresponding base
  modified_base (8)..(8): 2'-hydroxy corresponding base
  modified_base (9)..(9): 2'-hydroxy corresponding base
  modified_base (10)..(10): 2'-O-methyl corresponding base
  modified_base (11)..(11): 2'-O-methyl corresponding base
  modified_base (12)..(12): 2'-hydroxy corresponding base
  modified_base (13)..(13): 2'-hydroxy corresponding base
  modified_base (14)..(14): 2'-hydroxy corresponding base
  modified_base (15)..(15): 2'-hydroxy corresponding base
  modified_base (16)..(16): 2'-hydroxy corresponding base
  modified_base (17)..(17): 2'-O-methyl corresponding base
  modified_base (18)..(18): 2'-O-methyl corresponding base
  modified_base (19)..(19): 2'-O-methyl corresponding base
  modified_base (20)..(20): deoxythymidine
  modified_base (21)..(21): 5'-thio thymidine
ggcucaugcagcagauggctt

SEQ ID NO: 1205 - DNA, 21 bp, Artificial Sequence
  Description of Artificial Sequence: Synthetic oligonucleotide
  Description of Combined DNA/RNA Molecule: Synthetic oligonucleotide
  siRNAs to PCSK9
  modified_base (1)..(1): 2'-hydroxy corresponding base
  modified_base (2)..(2): 2'-deoxy-2'-fluoro corresponding base
  modified_base (3)..(3): 2'-deoxy-2'-fluoro corresponding base
  modified_base (4)..(4): 2'-hydroxy corresponding base
  modified_base (5)..(5): 2'-deoxy-2'-fluoro corresponding base
  modified_base (6)..(6): 2'-deoxy-2'-fluoro corresponding base
  modified_base (7)..(7): 2'-deoxy-2'-fluoro corresponding base
  modified_base (8)..(8): 2'-hydroxy corresponding base
  modified_base (9)..(9): 2'-deoxy-2'-fluoro corresponding base
  modified_base (10)..(10): 2'-deoxy-2'-fluoro corresponding base
  modified_base (11)..(11): 2'-hydroxy corresponding base
  modified_base (12)..(12): 2'-deoxy-2'-fluoro corresponding base
  modified_base (13)..(13): 2'-deoxy-2'-fluoro corresponding base
  modified_base (14)..(14): 2'-hydroxy corresponding base
  modified_base (15)..(15): 2'-hydroxy corresponding base
  modified_base (16)..(16): 2'-hydroxy corresponding base
  modified_base (17)..(17): 2'-hydroxy corresponding base
  modified_base (18)..(18): 2'-deoxy-2'-fluoro corresponding base
  modified_base (19)..(19): 2'-deoxy-2'-fluoro corresponding base
  modified_base (20)..(20): deoxythymidine
  modified_base (21)..(21): 5'-thio thymidine
gccaucugcugccggagcctt

SEQ ID NO: 1206 - DNA, 21 bp, Artificial Sequence
  Description of Artificial Sequence: Synthetic oligonucleotide
  Description of Combined DNA/RNA Molecule: Synthetic oligonucleotide
  siRNAs to PCSK9
  modified_base (1)..(1): 2'-hydroxy corresponding base
  modified_base (2)..(2): 2'-hydroxy corresponding base
  modified_base (3)..(3): 2'-hydroxy corresponding base
  modified_base (4)..(4): 2'-hydroxy corresponding base
  modified_base (5)..(5): 2'-hydroxy corresponding base
  modified_base (6)..(6): 2'-O-methyl corresponding base
  modified_base (7)..(7): 2'-O-methyl corresponding base
  modified_base (8)..(8): 2'-hydroxy corresponding base
  modified_base (9)..(9): 2'-hydroxy corresponding base
  modified_base (10)..(10): 2'-O-methyl corresponding base
  modified_base (11)..(11): 2'-O-methyl corresponding base
  modified_base (12)..(12): 2'-hydroxy corresponding base
  modified_base (13)..(13): 2'-hydroxy corresponding base
  modified_base (14)..(14): 2'-hydroxy corresponding base
  modified_base (15)..(15): 2'-hydroxy corresponding base
  modified_base (16)..(16): 2'-hydroxy corresponding base
  modified_base (17)..(17): 2'-O-methyl corresponding base
  modified_base (18)..(18): 2'-O-methyl corresponding base
  modified_base (19)..(19): 2'-O-methyl corresponding base
  modified_base (20)..(20): deoxythymidine
  modified_base (21)..(21): 5'-thio thymidine
ggcucaugcagcagauggctt

SEQ ID NO: 1207 - DNA, 21 bp, Artificial Sequence
  Description of Artificial Sequence: Synthetic oligonucleotide
  Description of Combined DNA/RNA Molecule: Synthetic oligonucleotide
  siRNAs to PCSK9
  modified_base (1)..(1): 2'-hydroxy corresponding base
  modified_base (2)..(2): 2'-O-methyl corresponding base
  modified_base (3)..(3): 2'-hydroxy corresponding base
  modified_base (4)..(4): 2'-O-methyl corresponding base
  modified_base (5)..(5): 2'-hydroxy corresponding base
  modified_base (6)..(6): 2'-O-methyl corresponding base
  modified_base (7)..(7): 2'-hydroxy corresponding base
  modified_base (8)..(8): 2'-O-methyl corresponding base
  modified_base (9)..(9): 2'-hydroxy corresponding base
  modified_base (10)..(10): 2'-O-methyl corresponding base
  modified_base (11)..(11): 2'-hydroxy corresponding base
  modified_base (12)..(12): 2'-O-methyl corresponding base
  modified_base (13)..(13): 2'-hydroxy corresponding base
  modified_base (14)..(14): 2'-O-methyl corresponding base
  modified_base (15)..(15): 2'-hydroxy corresponding base
  modified_base (16)..(16): 2'-O-methyl corresponding base
  modified_base (17)..(17): 2'-hydroxy corresponding base
  modified_base (18)..(18): 2'-O-methyl corresponding base
  modified_base (19)..(19): 2'-hydroxy corresponding base
  modified_base (20)..(20): deoxythymidine
  modified_base (21)..(21): 5'-thio thymidine
gccaucugcugccggagcctt

SEQ ID NO: 1208 - DNA, 21 bp, Artificial Sequence
  Description of Artificial Sequence: Synthetic oligonucleotide
  Description of Combined DNA/RNA Molecule: Synthetic oligonucleotide
  siRNAs to PCSK9
  modified_base (1)..(1): 2'-hydroxy corresponding base
  modified_base (2)..(2): 2'-hydroxy corresponding base
  modified_base (3)..(3): 2'-hydroxy corresponding base
  modified_base (4)..(4): 2'-hydroxy corresponding base
  modified_base (5)..(5): 2'-hydroxy corresponding base
  modified_base (6)..(6): 2'-O-methyl corresponding base
  modified_base (7)..(7): 2'-O-methyl corresponding base
  modified_base (8)..(8): 2'-hydroxy corresponding base
  modified_base (9)..(9): 2'-hydroxy corresponding base
  modified_base (10)..(10): 2'-O-methyl corresponding base
  modified_base (11)..(11): 2'-O-methyl corresponding base
  modified_base (12)..(12): 2'-hydroxy corresponding base
  modified_base (13)..(13): 2'-hydroxy corresponding base
  modified_base (14)..(14): 2'-hydroxy corresponding base
  modified_base (15)..(15): 2'-hydroxy corresponding base
  modified_base (16)..(16): 2'-hydroxy corresponding base
  modified_base (17)..(17): 2'-O-methyl corresponding base
  modified_base (18)..(18): 2'-O-methyl corresponding base
  modified_base (19)..(19): 2'-O-methyl corresponding base
  modified_base (20)..(20): deoxythymidine
  modified_base (21)..(21): 5'-thio thymidine
ggcucaugcagcagauggctt

SEQ ID NO: 1209 - DNA, 21 bp, Artificial Sequence
  Description of Artificial Sequence: Synthetic oligonucleotide
  Description of Combined DNA/RNA Molecule: Synthetic oligonucleotide
  siRNAs to PCSK9
  modified_base (1)..(1): 2'-hydroxy corresponding base
  modified_base (2)..(2): 2'-hydroxy corresponding base
  modified_base (3)..(3): 2'-hydroxy corresponding base
  modified_base (4)..(4): 2'-hydroxy corresponding base
  modified_base (5)..(5): 2'-hydroxy corresponding base
  modified_base (6)..(6): 2'-hydroxy corresponding base
  modified_base (7)..(7): 2'-hydroxy corresponding base
  modified_base (8)..(8): 2'-hydroxy corresponding base
  modified_base (9)..(9): 2'-hydroxy corresponding base
  modified_base (10)..(10): 2'-hydroxy corresponding base
  modified_base (11)..(11): 2'-hydroxy corresponding base
  modified_base (12)..(12): 2'-hydroxy corresponding base
  modified_base (13)..(13): 2'-hydroxy corresponding base
  modified_base (14)..(14): 2'-hydroxy corresponding base
  modified_base (15)..(15): 2'-hydroxy corresponding base
  modified_base (16)..(16): 2'-hydroxy corresponding base
  modified_base (17)..(17): 2'-hydroxy corresponding base
  modified_base (18)..(18): 2'-hydroxy corresponding base
  modified_base (19)..(19): 2'-hydroxy corresponding base
  modified_base (20)..(20): deoxythymidine
  modified_base (21)..(21): 5'-thio thymidine
cauuuaucuuuugggucugtt

SEQ ID NO: 1210 - DNA, 21 bp, Artificial Sequence
  Description of Artificial Sequence: Synthetic oligonucleotide
  Description of Combined DNA/RNA Molecule: Synthetic oligonucleotide
  siRNAs to PCSK9
  modified_base (1)..(1): 2'-hydroxy corresponding base
  modified_base (2)..(2): 2'-hydroxy corresponding base
  modified_base (3)..(3): 2'-hydroxy corresponding base
  modified_base (4)..(4): 2'-hydroxy corresponding base
  modified_base (5)..(5): 2'-hydroxy corresponding base
  modified_base (6)..(6): 2'-hydroxy corresponding base
  modified_base (7)..(7): 2'-hydroxy corresponding base
  modified_base (8)..(8): 2'-hydroxy corresponding base
  modified_base (9)..(9): 2'-hydroxy corresponding base
  modified_base (10)..(10): 2'-hydroxy corresponding base
  modified_base (11)..(11): 2'-hydroxy corresponding base
  modified_base (12)..(12): 2'-hydroxy corresponding base
  modified_base (13)..(13): 2'-hydroxy corresponding base
  modified_base (14)..(14): 2'-hydroxy corresponding base
  modified_base (15)..(15): 2'-hydroxy corresponding base
  modified_base (16)..(16): 2'-hydroxy corresponding base
  modified_base (17)..(17): 2'-hydroxy corresponding base
  modified_base (18)..(18): 2'-hydroxy corresponding base
  modified_base (19)..(19): 2'-hydroxy corresponding base
  modified_base (20)..(20): deoxythymidine
  modified_base (21)..(21): 5'-thio thymidine
cagacccaaaagauaaaugtt

SEQ ID NO: 1211 - DNA, 21 bp, Artificial Sequence
  Description of Artificial Sequence: Synthetic oligonucleotide
  Description of Combined DNA/RNA Molecule: Synthetic oligonucleotide
  siRNAs to PCSK9
  modified_base (1)..(1): 2'-O-methyl corresponding base
  modified_base (2)..(2): 2'-hydroxy corresponding base
  modified_base (3)..(3): 2'-O-methyl corresponding base
  modified_base (4)..(4): 2'-O-methyl corresponding base
  modified_base (5)..(5): 2'-O-methyl corresponding base
  modified_base (6)..(6): 2'-hydroxy corresponding base
  modified_base (7)..(7): 2'-O-methyl corresponding base
  modified_base (8)..(8): 2'-O-methyl corresponding base
  modified_base (9)..(9): 2'-O-methyl corresponding base
  modified_base (10)..(10): 2'-O-methyl corresponding base
  modified_base (11)..(11): 2'-O-methyl corresponding base
  modified_base (12)..(12): 2'-O-methyl corresponding base
  modified_base (13)..(13): 2'-hydroxy corresponding base
  modified_base (14)..(14): 2'-hydroxy corresponding base
  modified_base (15)..(15): 2'-hydroxy corresponding base
  modified_base (16)..(16): 2'-O-methyl corresponding base
  modified_base (17)..(17): 2'-O-methyl corresponding base
  modified_base (18)..(18): 2'-O-methyl corresponding base
  modified_base (19)..(19): 2'-hydroxy corresponding base
  modified_base (20)..(20): deoxythymidine
  modified_base (21)..(21): 5'-thio thymidine
cauuuaucuuuugggucugtt

SEQ ID NO: 1212 - DNA, 21 bp, Artificial Sequence
  Description of Artificial Sequence: Synthetic oligonucleotide
  Description of Combined DNA/RNA Molecule: Synthetic oligonucleotide
  siRNAs to PCSK9
  modified_base (1)..(1): 2'-O-methyl corresponding base
  modified_base (2)..(2): 2'-hydroxy corresponding base
  modified_base (3)..(3): 2'-hydroxy corresponding base
  modified_base (4)..(4): 2'-hydroxy corresponding base
  modified_base (5)..(5): 2'-hydroxy corresponding base
  modified_base (6)..(6): 2'-hydroxy corresponding base
  modified_base (7)..(7): 2'-O-methyl corresponding base
  modified_base (8)..(8): 2'-hydroxy corresponding base
  modified_base (9)..(9): 2'-hydroxy corresponding base
  modified_base (10)..(10): 2'-hydroxy corresponding base
  modified_base (11)..(11): 2'-hydroxy corresponding base
  modified_base (12)..(12): 2'-hydroxy corresponding base
  modified_base (13)..(13): 2'-hydroxy corresponding base
  modified_base (14)..(14): 2'-O-methyl corresponding base
  modified_base (15)..(15): 2'-hydroxy corresponding base
  modified_base (16)..(16): 2'-hydroxy corresponding base
  modified_base (17)..(17): 2'-hydroxy corresponding base
  modified_base (18)..(18): 2'-hydroxy corresponding base
  modified_base (19)..(19): 2'-hydroxy corresponding base
  modified_base (20)..(20): deoxythymidine
  modified_base (21)..(21): 5'-thio thymidine
cagacccaaaagauaaaugtt

SEQ ID NO: 1213 - DNA, 21 bp, Artificial Sequence
  Description of Artificial Sequence: Synthetic oligonucleotide
  Description of Combined DNA/RNA Molecule: Synthetic oligonucleotide
  siRNAs to PCSK9
  modified_base (1)..(1): 2'-hydroxy corresponding base
  modified_base (2)..(2): 2'-hydroxy corresponding base
  modified_base (3)..(3): 2'-hydroxy corresponding base
  modified_base (4)..(4): 2'-hydroxy corresponding base
  modified_base (5)..(5): 2'-hydroxy corresponding base
  modified_base (6)..(6): 2'-hydroxy corresponding base
  modified_base (7)..(7): 2'-hydroxy corresponding base
  modified_base (8)..(8): 2'-hydroxy corresponding base
  modified_base (9)..(9): 2'-hydroxy corresponding base
  modified_base (10)..(10): 2'-hydroxy corresponding base
  modified_base (11)..(11): 2'-hydroxy corresponding base
  modified_base (12)..(12): 2'-hydroxy corresponding base
  modified_base (13)..(13): 2'-hydroxy corresponding base
  modified_base (14)..(14): 2'-hydroxy corresponding base
  modified_base (15)..(15): 2'-hydroxy corresponding base
  modified_base (16)..(16): 2'-hydroxy corresponding base
  modified_base (17)..(17): 2'-hydroxy corresponding base
  modified_base (18)..(18): 2'-hydroxy corresponding base
  modified_base (19)..(19): 2'-hydroxy corresponding base
  modified_base (20)..(20): deoxythymidine
  modified_base (21)..(21): 5'-thio thymidine
uaucuuuugggucuguccutt

SEQ ID NO: 1214 - DNA, 21 bp, Artificial Sequence
  Description of Artificial Sequence: Synthetic oligonucleotide
  Description of Combined DNA/RNA Molecule: Synthetic oligonucleotide
  siRNAs to PCSK9
  modified_base (1)..(1): 2'-hydroxy corresponding base
  modified_base (2)..(2): 2'-hydroxy corresponding base
  modified_base (3)..(3): 2'-hydroxy corresponding base
  modified_base (4)..(4): 2'-hydroxy corresponding base
  modified_base (5)..(5): 2'-hydroxy corresponding base
  modified_base (6)..(6): 2'-hydroxy corresponding base
  modified_base (7)..(7): 2'-hydroxy corresponding base
  modified_base (8)..(8): 2'-hydroxy corresponding base
  modified_base (9)..(9): 2'-hydroxy corresponding base
  modified_base (10)..(10): 2'-hydroxy corresponding base
  modified_base (11)..(11): 2'-hydroxy corresponding base
  modified_base (12)..(12): 2'-hydroxy corresponding base
  modified_base (13)..(13): 2'-hydroxy corresponding base
  modified_base (14)..(14): 2'-hydroxy corresponding base
  modified_base (15)..(15): 2'-hydroxy corresponding base
  modified_base (16)..(16): 2'-hydroxy corresponding base
  modified_base (17)..(17): 2'-hydroxy corresponding base
  modified_base (18)..(18): 2'-hydroxy corresponding base
  modified_base (19)..(19): 2'-hydroxy corresponding base
  modified_base (20)..(20): deoxythymidine
  modified_base (21)..(21): 5'-thio thymidine
aggacagacccaaaagauatt

SEQ ID NO: 1215 - DNA, 21 bp, Artificial Sequence
  Description of Artificial Sequence: Synthetic oligonucleotide
  Description of Combined DNA/RNA Molecule: Synthetic oligonucleotide
  siRNAs to PCSK9
  modified_base (1)..(1): 2'-O-methyl corresponding base
  modified_base (2)..(2): 2'-hydroxy corresponding base
  modified_base (3)..(3): 2'-O-methyl corresponding base
  modified_base (4)..(4): 2'-O-methyl corresponding base
  modified_base (5)..(5): 2'-O-methyl corresponding base
  modified_base (6)..(6): 2'-O-methyl corresponding base
  modified_base (7)..(7): 2'-O-methyl corresponding base
  modified_base (8)..(8): 2'-O-methyl corresponding base
  modified_base (9)..(9): 2'-hydroxy corresponding base
  modified_base (10)..(10): 2'-hydroxy corresponding base
  modified_base (11)..(11): 2'-hydroxy corresponding base
  modified_base (12)..(12): 2'-O-methyl corresponding base
  modified_base (13)..(13): 2'-O-methyl corresponding base
  modified_base (14)..(14): 2'-O-methyl corresponding base
  modified_base (15)..(15): 2'-hydroxy corresponding base
  modified_base (16)..(16): 2'-O-methyl corresponding base
  modified_base (17)..(17): 2'-O-methyl corresponding base
  modified_base (18)..(18): 2'-O-methyl corresponding base
  modified_base (19)..(19): 2'-O-methyl corresponding base
  modified_base (20)..(20): deoxythymidine
  modified_base (21)..(21): 5'-thio thymidine
uaucuuuugggucuguccutt

SEQ ID NO: 1216 - DNA, 21 bp, Artificial Sequence
  Description of Artificial Sequence: Synthetic oligonucleotide
  Description of Combined DNA/RNA Molecule: Synthetic oligonucleotide
  siRNAs to PCSK9
  modified_base (1)..(1): 2'-hydroxy corresponding base
  modified_base (2)..(2): 2'-hydroxy corresponding base
  modified_base (3)..(3): 2'-hydroxy corresponding base
  modified_base (4)..(4): 2'-hydroxy corresponding base
  modified_base (5)..(5): 2'-O-methyl corresponding base
  modified_base (6)..(6): 2'-hydroxy corresponding base
  modified_base (7)..(7): 2'-hydroxy corresponding base
  modified_base (8)..(8): 2'-hydroxy corresponding base
  modified_base (9)..(9): 2'-hydroxy corresponding base
  modified_base (10)..(10): 2'-hydroxy corresponding base
  modified_base (11)..(11): 2'-O-methyl corresponding base
  modified_base (12)..(12): 2'-hydroxy corresponding base
  modified_base (13)..(13): 2'-hydroxy corresponding base
  modified_base (14)..(14): 2'-hydroxy corresponding base
  modified_base (15)..(15): 2'-hydroxy corresponding base
  modified_base (16)..(16): 2'-hydroxy corresponding base
  modified_base (17)..(17): 2'-hydroxy corresponding base
  modified_base (18)..(18): 2'-O-methyl corresponding base
  modified_base (19)..(19): 2'-hydroxy corresponding base
  modified_base (20)..(20): deoxythymidine
  modified_base (21)..(21): 5'-thio thymidine
aggacagacccaaaagauatt

SEQ ID NO: 1217 - DNA, 21 bp, Artificial Sequence
  Description of Artificial Sequence: Synthetic oligonucleotide
  Description of Combined DNA/RNA Molecule: Synthetic oligonucleotide
  siRNAs to PCSK9
  modified_base (1)..(1): 2'-hydroxy corresponding base
  modified_base (2)..(2): 2'-hydroxy corresponding base
  modified_base (3)..(3): 2'-hydroxy corresponding base
  modified_base (4)..(4): 2'-hydroxy corresponding base
  modified_base (5)..(5): 2'-hydroxy corresponding base
  modified_base (6)..(6): 2'-hydroxy corresponding base
  modified_base (7)..(7): 2'-hydroxy corresponding base
  modified_base (8)..(8): 2'-hydroxy corresponding base
  modified_base (9)..(9): 2'-hydroxy corresponding base
  modified_base (10)..(10): 2'-hydroxy corresponding base
  modified_base (11)..(11): 2'-hydroxy corresponding base
  modified_base (12)..(12): 2'-hydroxy corresponding base
  modified_base (13)..(13): 2'-hydroxy corresponding base
  modified_base (14)..(14): 2'-hydroxy corresponding base
  modified_base (15)..(15): 2'-hydroxy corresponding base
  modified_base (16)..(16): 2'-hydroxy corresponding base
  modified_base (17)..(17): 2'-hydroxy corresponding base
  modified_base (18)..(18): 2'-hydroxy corresponding base
  modified_base (19)..(19): 2'-hydroxy corresponding base
  modified_base (20)..(20): deoxythymidine
  modified_base (21)..(21): 5'-thio thymidine
cucuguugccuuuuuacagtt

SEQ ID NO: 1218 - DNA, 21 bp, Artificial Sequence
  Description of Artificial Sequence: Synthetic oligonucleotide
  Description of Combined DNA/RNA Molecule: Synthetic oligonucleotide
  siRNAs to PCSK9
  modified_base (1)..(1): 2'-hydroxy corresponding base
  modified_base (2)..(2): 2'-hydroxy corresponding base
  modified_base (3)..(3): 2'-hydroxy corresponding base
  modified_base (4)..(4): 2'-hydroxy corresponding base
  modified_base (5)..(5): 2'-hydroxy corresponding base
  modified_base (6)..(6): 2'-hydroxy corresponding base
  modified_base (7)..(7): 2'-hydroxy corresponding base
  modified_base (8)..(8): 2'-hydroxy corresponding base
  modified_base (9)..(9): 2'-hydroxy corresponding base
  modified_base (10)..(10): 2'-hydroxy corresponding base
  modified_base (11)..(11): 2'-hydroxy corresponding base
  modified_base (12)..(12): 2'-hydroxy corresponding base
  modified_base (13)..(13): 2'-hydroxy corresponding base
  modified_base (14)..(14): 2'-hydroxy corresponding base
  modified_base (15)..(15): 2'-hydroxy corresponding base
  modified_base (16)..(16): 2'-hydroxy corresponding base
  modified_base (17)..(17): 2'-hydroxy corresponding base
  modified_base (18)..(18): 2'-hydroxy corresponding base
  modified_base (19)..(19): 2'-hydroxy corresponding base
  modified_base (20)..(20): deoxythymidine
  modified_base (21)..(21): 5'-thio thymidine
cuguaaaaaggcaacagagtt

SEQ ID NO: 1219 - DNA, 21 bp, Artificial Sequence
  Description of Artificial Sequence: Synthetic oligonucleotide
  Description of Combined DNA/RNA Molecule: Synthetic oligonucleotide
  siRNAs to PCSK9
  modified_base (1)..(1): 2'-O-methyl corresponding base
  modified_base (2)..(2): 2'-O-methyl corresponding base
  modified_base (3)..(3): 2'-O-methyl corresponding base
  modified_base (4)..(4): 2'-O-methyl corresponding base
  modified_base (5)..(5): 2'-hydroxy corresponding base
  modified_base (6)..(6): 2'-O-methyl corresponding base
  modified_base (7)..(7): 2'-O-methyl corresponding base
  modified_base (8)..(8): 2'-hydroxy corresponding base
  modified_base (9)..(9): 2'-O-methyl corresponding base
  modified_base (10)..(10): 2'-O-methyl corresponding base
  modified_base (11)..(11): 2'-O-methyl corresponding base
  modified_base (12)..(12): 2'-O-methyl corresponding base
  modified_base (13)..(13): 2'-O-methyl corresponding base
  modified_base (14)..(14): 2'-O-methyl corresponding base
  modified_base (15)..(15): 2'-O-methyl corresponding base
  modified_base (16)..(16): 2'-hydroxy corresponding base
  modified_base (17)..(17): 2'-O-methyl corresponding base
  modified_base (18)..(18): 2'-hydroxy corresponding base
  modified_base (19)..(19): 2'-hydroxy corresponding base
  modified_base (20)..(20): deoxythymidine
  modified_base (21)..(21): 5'-thio thymidine
cucuguugccuuuuuacagtt

SEQ ID NO: 1220 - DNA, 21 bp, Artificial Sequence
  Description of Artificial Sequence: Synthetic oligonucleotide
  Description of Combined DNA/RNA Molecule: Synthetic oligonucleotide
  siRNAs to PCSK9
  modified_base (1)..(1): 2'-hydroxy corresponding base
  modified_base (2)..(2): 2'-hydroxy corresponding base
  modified_base (3)..(3): 2'-hydroxy corresponding base
  modified_base (4)..(4): 2'-O-methyl corresponding base
  modified_base (5)..(5): 2'-hydroxy corresponding base
  modified_base (6)..(6): 2'-hydroxy corresponding base
  modified_base (7)..(7): 2'-hydroxy corresponding base
  modified_base (8)..(8): 2'-hydroxy corresponding base
  modified_base (9)..(9): 2'-hydroxy corresponding base
  modified_base (10)..(10): 2'-hydroxy corresponding base
  modified_base (11)..(11): 2'-hydroxy corresponding base
  modified_base (12)..(12): 2'-O-methyl corresponding base
  modified_base (13)..(13): 2'-hydroxy corresponding base
  modified_base (14)..(14): 2'-hydroxy corresponding base
  modified_base (15)..(15): 2'-O-methyl corresponding base
  modified_base (16)..(16): 2'-hydroxy corresponding base
  modified_base (17)..(17): 2'-hydroxy corresponding base
  modified_base (18)..(18): 2'-hydroxy corresponding base
  modified_base (19)..(19): 2'-hydroxy corresponding base
  modified_base (20)..(20): deoxythymidine
  modified_base (21)..(21): 5'-thio thymidine
cuguaaaaaggcaacagagtt

SEQ ID NO: 1221 - DNA, 21 bp, Artificial Sequence
  Description of Artificial Sequence: Synthetic oligonucleotide
  Description of Combined DNA/RNA Molecule: Synthetic oligonucleotide
  siRNAs to PCSK9
  modified_base (1)..(1): 2'-hydroxy corresponding base
  modified_base (2)..(2): 2'-hydroxy corresponding base
  modified_base (3)..(3): 2'-hydroxy corresponding base
  modified_base (4)..(4): 2'-hydroxy corresponding base
  modified_base (5)..(5): 2'-hydroxy corresponding base
  modified_base (6)..(6): 2'-hydroxy corresponding base
  modified_base (7)..(7): 2'-hydroxy corresponding base
  modified_base (8)..(8): 2'-hydroxy corresponding base
  modified_base (9)..(9): 2'-hydroxy corresponding base
  modified_base (10)..(10): 2'-hydroxy corresponding base
  modified_base (11)..(11): 2'-hydroxy corresponding base
  modified_base (12)..(12): 2'-hydroxy corresponding base
  modified_base (13)..(13): 2'-hydroxy corresponding base
  modified_base (14)..(14): 2'-hydroxy corresponding base
  modified_base (15)..(15): 2'-hydroxy corresponding base
  modified_base (16)..(16): 2'-hydroxy corresponding base
  modified_base (17)..(17): 2'-hydroxy corresponding base
  modified_base (18)..(18): 2'-hydroxy corresponding base
  modified_base (19)..(19): 2'-hydroxy corresponding base
  modified_base (20)..(20): deoxythymidine
  modified_base (21)..(21): deoxythymidine
ccuuuuuacagccaacuuutt

SEQ ID NO: 1222 - DNA, 21 bp, Artificial Sequence
  Description of Artificial Sequence: Synthetic oligonucleotide
  Description of Combined DNA/RNA Molecule: Synthetic oligonucleotide
  siRNAs to PCSK9
  modified_base (1)..(1): 2'-hydroxy corresponding base
  modified_base (2)..(2): 2'-hydroxy corresponding base
  modified_base (3)..(3): 2'-hydroxy corresponding base
  modified_base (4)..(4): 2'-hydroxy corresponding base
  modified_base (5)..(5): 2'-hydroxy corresponding base
  modified_base (6)..(6): 2'-hydroxy corresponding base
  modified_base (7)..(7): 2'-hydroxy corresponding base
  modified_base (8)..(8): 2'-hydroxy corresponding base
  modified_base (9)..(9): 2'-hydroxy corresponding base
  modified_base (10)..(10): 2'-hydroxy corresponding base
  modified_base (11)..(11): 2'-hydroxy corresponding base
  modified_base (12)..(12): 2'-hydroxy corresponding base
  modified_base (13)..(13): 2'-hydroxy corresponding base
  modified_base (14)..(14): 2'-hydroxy corresponding base
  modified_base (15)..(15): 2'-hydroxy corresponding base
  modified_base (16)..(16): 2'-hydroxy corresponding base
  modified_base (17)..(17): 2'-hydroxy corresponding base
  modified_base (18)..(18): 2'-hydroxy corresponding base
  modified_base (19)..(19): 2'-hydroxy corresponding base
  modified_base (20)..(20): deoxythymidine
  modified_base (21)..(21): deoxythymidine
aaaguuggcuguaaaaaggtt

SEQ ID NO: 1223 - DNA, 21 bp, Artificial Sequence
  Description of Artificial Sequence: Synthetic oligonucleotide
  Description of Combined DNA/RNA Molecule: Synthetic oligonucleotide
  siRNAs to PCSK9
  modified_base (1)..(1): 2'-hydroxy corresponding base
  modified_base (2)..(2): 2'-hydroxy corresponding base
  modified_base (3)..(3): 2'-hydroxy corresponding base
  modified_base (4)..(4): 2'-hydroxy corresponding base
  modified_base (5)..(5): 2'-hydroxy corresponding base
  modified_base (6)..(6): 2'-hydroxy corresponding base
  modified_base (7)..(7): 2'-hydroxy corresponding base
  modified_base (8)..(8): 2'-hydroxy corresponding base
  modified_base (9)..(9): 2'-hydroxy corresponding base
  modified_base (10)..(10): 2'-hydroxy corresponding base
  modified_base (11)..(11): 2'-hydroxy corresponding base
  modified_base (12)..(12): 2'-hydroxy corresponding base
  modified_base (13)..(13): 2'-hydroxy corresponding base
  modified_base (14)..(14): 2'-hydroxy corresponding base
  modified_base (15)..(15): 2'-hydroxy corresponding base
  modified_base (16)..(16): 2'-hydroxy corresponding base
  modified_base (17)..(17): 2'-hydroxy corresponding base
  modified_base (18)..(18): 2'-hydroxy corresponding base
  modified_base (19)..(19): 2'-hydroxy corresponding base
  modified_base (20)..(20): deoxythymidine
  modified_base (21)..(21): deoxythymidine
agccaacuuuucuagaccutt

SEQ ID NO: 1224 - DNA, 21 bp, Artificial Sequence
  Description of Artificial Sequence: Synthetic oligonucleotide
  Description of Combined DNA/RNA Molecule: Synthetic oligonucleotide
  siRNAs to PCSK9
  modified_base (1)..(1): 2'-hydroxy corresponding base
  modified_base (2)..(2): 2'-hydroxy corresponding base
  modified_base (3)..(3): 2'-hydroxy corresponding base
  modified_base (4)..(4): 2'-hydroxy corresponding base
  modified_base (5)..(5): 2'-hydroxy corresponding base
  modified_base (6)..(6): 2'-hydroxy corresponding base
  modified_base (7)..(7): 2'-hydroxy corresponding base
  modified_base (8)..(8): 2'-hydroxy corresponding base
  modified_base (9)..(9): 2'-hydroxy corresponding base
  modified_base (10)..(10): 2'-hydroxy corresponding base
  modified_base (11)..(11): 2'-hydroxy corresponding base
  modified_base (12)..(12): 2'-hydroxy corresponding base
  modified_base (13)..(13): 2'-hydroxy corresponding base
  modified_base (14)..(14): 2'-hydroxy corresponding base
  modified_base (15)..(15): 2'-hydroxy corresponding base
  modified_base (16)..(16): 2'-hydroxy corresponding base
  modified_base (17)..(17): 2'-hydroxy corresponding base
  modified_base (18)..(18): 2'-hydroxy corresponding base
  modified_base (19)..(19): 2'-hydroxy corresponding base
  modified_base (20)..(20): deoxythymidine
  modified_base (21)..(21): deoxythymidine
aggucuagaaaaguuggcutt

SEQ ID NO: 1225 - DNA, 21 bp, Artificial Sequence
  Description of Artificial Sequence: Synthetic oligonucleotide
  Description of Combined DNA/RNA Molecule: Synthetic oligonucleotide
  siRNAs to PCSK9
  modified_base (1)..(1): 2'-hydroxy corresponding base
  modified_base (2)..(2): 2'-hydroxy corresponding base
  modified_base (3)..(3): 2'-hydroxy corresponding base
  modified_base (4)..(4): 2'-hydroxy corresponding base
  modified_base (5)..(5): 2'-hydroxy corresponding base
  modified_base (6)..(6): 2'-hydroxy corresponding base
  modified_base (7)..(7): 2'-hydroxy corresponding base
  modified_base (8)..(8): 2'-hydroxy corresponding base
  modified_base (9)..(9): 2'-hydroxy corresponding base
  modified_base (10)..(10): 2'-hydroxy corresponding base
  modified_base (11)..(11): 2'-hydroxy corresponding base
  modified_base (12)..(12): 2'-hydroxy corresponding base
  modified_base (13)..(13): 2'-hydroxy corresponding base
  modified_base (14)..(14): 2'-hydroxy corresponding base
  modified_base (15)..(15): 2'-hydroxy corresponding base
  modified_base (16)..(16): 2'-hydroxy corresponding base
  modified_base (17)..(17): 2'-hydroxy corresponding base
  modified_base (18)..(18): 2'-hydroxy corresponding base
  modified_base (19)..(19): 2'-hydroxy corresponding base
  modified_base (20)..(20): deoxythymidine
  modified_base (21)..(21): deoxythymidine
acuuuucuagaccuguuuutt

SEQ ID NO: 1226 - DNA, 21 bp, Artificial Sequence
  Description of Artificial Sequence: Synthetic oligonucleotide
  Description of Combined DNA/RNA Molecule: Synthetic oligonucleotide
  siRNAs to PCSK9
  modified_base (1)..(1): 2'-hydroxy corresponding base
  modified_base (2)..(2): 2'-hydroxy corresponding base
  modified_base (3)..(3): 2'-hydroxy corresponding base
  modified_base (4)..(4): 2'-hydroxy corresponding base
  modified_base (5)..(5): 2'-hydroxy corresponding base
  modified_base (6)..(6): 2'-hydroxy corresponding base
  modified_base (7)..(7): 2'-hydroxy corresponding base
  modified_base (8)..(8): 2'-hydroxy corresponding base
  modified_base (9)..(9): 2'-hydroxy corresponding base
  modified_base (10)..(10): 2'-hydroxy corresponding base
  modified_base (11)..(11): 2'-hydroxy corresponding base
  modified_base (12)..(12): 2'-hydroxy corresponding base
  modified_base (13)..(13): 2'-hydroxy corresponding base
  modified_base (14)..(14): 2'-hydroxy corresponding base
  modified_base (15)..(15): 2'-hydroxy corresponding base
  modified_base (16)..(16): 2'-hydroxy corresponding base
  modified_base (17)..(17): 2'-hydroxy corresponding base
  modified_base (18)..(18): 2'-hydroxy corresponding base
  modified_base (19)..(19): 2'-hydroxy corresponding base
  modified_base (20)..(20): deoxythymidine
  modified_base (21)..(21): deoxythymidine
aaaacaggucuagaaaagutt

SEQ ID NO: 1227 - DNA, 21 bp, Artificial Sequence
  Description of Artificial Sequence: Synthetic oligonucleotide
  Description of Combined DNA/RNA Molecule: Synthetic oligonucleotide
  siRNAs to PCSK9
  modified_base (1)..(1): 2'-hydroxy corresponding base
  modified_base (2)..(2): 2'-hydroxy corresponding base
  modified_base (3)..(3): 2'-hydroxy corresponding base
  modified_base (4)..(4): 2'-hydroxy corresponding base
  modified_base (5)..(5): 2'-hydroxy corresponding base
  modified_base (6)..(6): 2'-hydroxy corresponding base
  modified_base (7)..(7): 2'-hydroxy corresponding base
  modified_base (8)..(8): 2'-hydroxy corresponding base
  modified_base (9)..(9): 2'-hydroxy corresponding base
  modified_base (10)..(10): 2'-hydroxy corresponding base
  modified_base (11)..(11): 2'-hydroxy corresponding base
  modified_base (12)..(12): 2'-hydroxy corresponding base
  modified_base (13)..(13): 2'-hydroxy corresponding base
  modified_base (14)..(14): 2'-hydroxy corresponding base
  modified_base (15)..(15): 2'-hydroxy corresponding base
  modified_base (16)..(16): 2'-hydroxy corresponding base
  modified_base (17)..(17): 2'-hydroxy corresponding base
  modified_base (18)..(18): 2'-hydroxy corresponding base
  modified_base (19)..(19): 2'-hydroxy corresponding base
  modified_base (20)..(20): deoxythymidine
  modified_base (21)..(21): 5'-thio thymidine
uucuagaccuguuuugcuutt

SEQ ID NO: 1228 - DNA, 21 bp, Artificial Sequence
  Description of Artificial Sequence: Synthetic oligonucleotide
  Description of Combined DNA/RNA Molecule: Synthetic oligonucleotide
  siRNAs to PCSK9
  modified_base (1)..(1): 2'-hydroxy corresponding base
  modified_base (2)..(2): 2'-hydroxy corresponding base
  modified_base (3)..(3): 2'-hydroxy corresponding base
  modified_base (4)..(4): 2'-hydroxy corresponding base
  modified_base (5)..(5): 2'-hydroxy corresponding base
  modified_base (6)..(6): 2'-hydroxy corresponding base
  modified_base (7)..(7): 2'-hydroxy corresponding base
  modified_base (8)..(8): 2'-hydroxy corresponding base
  modified_base (9)..(9): 2'-hydroxy corresponding base
  modified_base (10)..(10): 2'-hydroxy corresponding base
  modified_base (11)..(11): 2'-hydroxy corresponding base
  modified_base (12)..(12): 2'-hydroxy corresponding base
  modified_base (13)..(13): 2'-hydroxy corresponding base
  modified_base (14)..(14): 2'-hydroxy corresponding base
  modified_base (15)..(15): 2'-hydroxy corresponding base
  modified_base (16)..(16): 2'-hydroxy corresponding base
  modified_base (17)..(17): 2'-hydroxy corresponding base
  modified_base (18)..(18): 2'-hydroxy corresponding base
  modified_base (19)..(19): 2'-hydroxy corresponding base
  modified_base (20)..(20): deoxythymidine
  modified_base (21)..(21): 5'-thio thymidine
aagcaaaacaggucuagaatt

SEQ ID NO: 1229 - DNA, 21 bp, Artificial Sequence
  Description of Artificial Sequence: Synthetic oligonucleotide
  Description of Combined DNA/RNA Molecule: Synthetic oligonucleotide
  siRNAs to PCSK9
  modified_base (1)..(1): 2'-O-methyl corresponding base
  modified_base (2)..(2): 2'-O-methyl corresponding base
  modified_base (3)..(3): 2'-O-methyl corresponding base
  modified_base (4)..(4): 2'-O-methyl corresponding base
  modified_base (5)..(5): 2'-hydroxy corresponding base
  modified_base (6)..(6): 2'-hydroxy corresponding base
  modified_base (7)..(7): 2'-hydroxy corresponding base
  modified_base (8)..(8): 2'-O-methyl corresponding base
  modified_base (9)..(9): 2'-O-methyl corresponding base
  modified_base (10)..(10): 2'-O-methyl corresponding base
  modified_base (11)..(11): 2'-hydroxy corresponding base
  modified_base (12)..(12): 2'-O-methyl corresponding base
  modified_base (13)..(13): 2'-O-methyl corresponding base
  modified_base (14)..(14): 2'-O-methyl corresponding base
  modified_base (15)..(15): 2'-O-methyl corresponding base
  modified_base (16)..(16): 2'-hydroxy corresponding base
  modified_base (17)..(17): 2'-O-methyl corresponding base
  modified_base (18)..(18): 2'-O-methyl corresponding base
  modified_base (19)..(19): 2'-O-methyl corresponding base
  modified_base (20)..(20): deoxythymidine
  modified_base (21)..(21): 5'-thio thymidine
uucuagaccuguuuugcuutt

SEQ ID NO: 1230 - DNA, 21 bp, Artificial Sequence
  Description of Artificial Sequence: Synthetic oligonucleotide
  Description of Combined DNA/RNA Molecule: Synthetic oligonucleotide
  siRNAs to PCSK9
  modified_base (1)..(1): 2'-hydroxy corresponding base
  modified_base (2)..(2): 2'-hydroxy corresponding base
  modified_base (3)..(3): 2'-hydroxy corresponding base
  modified_base (4)..(4): 2'-O-methyl corresponding base
  modified_base (5)..(5): 2'-hydroxy corresponding base
  modified_base (6)..(6): 2'-hydroxy corresponding base
  modified_base (7)..(7): 2'-hydroxy corresponding base
  modified_base (8)..(8): 2'-hydroxy corresponding base
  modified_base (9)..(9): 2'-O-methyl corresponding base
  modified_base (10)..(10): 2'-hydroxy corresponding base
  modified_base (11)..(11): 2'-hydroxy corresponding base
  modified_base (12)..(12): 2'-hydroxy corresponding base
  modified_base (13)..(13): 2'-hydroxy corresponding base
  modified_base (14)..(14): 2'-hydroxy corresponding base
  modified_base (15)..(15): 2'-O-methyl corresponding base
  modified_base (16)..(16): 2'-hydroxy corresponding base
  modified_base (17)..(17): 2'-hydroxy corresponding base
  modified_base (18)..(18): 2'-hydroxy corresponding base
  modified_base (19)..(19): 2'-hydroxy corresponding base
  modified_base (20)..(20): deoxythymidine
  modified_base (21)..(21): 5'-thio thymidine
aagcaaaacaggucuagaatt

SEQ ID NO: 1231 - DNA, 21 bp, Artificial Sequence
  Description of Artificial Sequence: Synthetic oligonucleotide
  Description of Combined DNA/RNA Molecule: Synthetic oligonucleotide
  siRNAs to PCSK9
  modified_base (1)..(1): 2'-deoxy-2'-fluoro corresponding base
  modified_base (2)..(2): 2'-O-methyl corresponding base
  modified_base (3)..(3): 2'-deoxy-2'-fluoro corresponding base
  modified_base (4)..(4): 2'-O-methyl corresponding base
  modified_base (5)..(5): 2'-deoxy-2'-fluoro corresponding base
  modified_base (6)..(6): 2'-O-methyl corresponding base
  modified_base (7)..(7): 2'-deoxy-2'-fluoro corresponding base
  modified_base (8)..(8): 2'-O-methyl corresponding base
  modified_base (9)..(9): 2'-deoxy-2'-fluoro corresponding base
  modified_base (10)..(10): 2'-O-methyl corresponding base
  modified_base (11)..(11): 2'-deoxy-2'-fluoro corresponding base
  modified_base (12)..(12): 2'-O-methyl corresponding base
  modified_base (13)..(13): 2'-deoxy-2'-fluoro corresponding base
  modified_base (14)..(14): 2'-O-methyl corresponding base
  modified_base (15)..(15): 2'-deoxy-2'-fluoro corresponding base
  modified_base (16)..(16): 2'-O-methyl corresponding base
  modified_base (17)..(17): 2'-deoxy-2'-fluoro corresponding base
  modified_base (18)..(18): 2'-O-methyl corresponding base
  modified_base (19)..(19): 2'-deoxy-2'-fluoro corresponding base
  modified_base (20)..(20): deoxythymidine
  modified_base (21)..(21): 5'-thio thymidine
uucuagaccuguuuugcuutt

SEQ ID NO: 1232 - DNA, 21 bp, Artificial Sequence
  Description of Artificial Sequence: Synthetic oligonucleotide
  Description of Combined DNA/RNA Molecule: Synthetic oligonucleotide
  siRNAs to PCSK9
  modified_base (1)..(1): 2'-O-methyl corresponding base
  modified_base (2)..(2): 2'-deoxy-2'-fluoro corresponding base
  modified_base (3)..(3): 2'-O-methyl corresponding base
  modified_base (4)..(4): 2'-deoxy-2'-fluoro corresponding base
  modified_base (5)..(5): 2'-O-methyl corresponding base
  modified_base (6)..(6): 2'-deoxy-2'-fluoro corresponding base
  modified_base (7)..(7): 2'-O-methyl corresponding base
  modified_base (8)..(8): 2'-deoxy-2'-fluoro corresponding base
  modified_base (9)..(9): 2'-O-methyl corresponding base
  modified_base (10)..(10): 2'-deoxy-2'-fluoro corresponding base
  modified_base (11)..(11): 2'-O-methyl corresponding base
  modified_base (12)..(12): 2'-deoxy-2'-fluoro corresponding base
  modified_base (13)..(13): 2'-O-methyl corresponding base
  modified_base (14)..(14): 2'-deoxy-2'-fluoro corresponding base
  modified_base (15)..(15): 2'-O-methyl corresponding base
  modified_base (16)..(16): 2'-deoxy-2'-fluoro corresponding base
  modified_base (17)..(17): 2'-O-methyl corresponding base
  modified_base (18)..(18): 2'-deoxy-2'-fluoro corresponding base
  modified_base (19)..(19): 2'-O-methyl corresponding base
  modified_base (20)..(20): deoxythymidine
  modified_base (21)..(21): 5'-thio thymidine
aagcaaaacaggucuagaatt

SEQ ID NO: 1233 - DNA, 21 bp, Artificial Sequence
  Description of Artificial Sequence: Synthetic oligonucleotide
  Description of Combined DNA/RNA Molecule: Synthetic oligonucleotide
  siRNAs to PCSK9
  modified_base (1)..(1): 2'-deoxy-2'-fluoro corresponding base
  modified_base (2)..(2): 2'-deoxy-2'-fluoro corresponding base
  modified_base (3)..(3): 2'-deoxy-2'-fluoro corresponding base
  modified_base (4)..(4): 2'-deoxy-2'-fluoro corresponding base
  modified_base (5)..(5): 2'-hydroxy corresponding base
  modified_base (6)..(6): 2'-hydroxy corresponding base
  modified_base (7)..(7): 2'-hydroxy corresponding base
  modified_base (8)..(8): 2'-deoxy-2'-fluoro corresponding base
  modified_base (9)..(9): 2'-deoxy-2'-fluoro corresponding base
  modified_base (10)..(10): 2'-deoxy-2'-fluoro corresponding base
  modified_base (11)..(11): 2'-hydroxy corresponding base
  modified_base (12)..(12): 2'-deoxy-2'-fluoro corresponding base
  modified_base (13)..(13): 2'-deoxy-2'-fluoro corresponding base
  modified_base (14)..(14): 2'-deoxy-2'-fluoro corresponding base
  modified_base (15)..(15): 2'-deoxy-2'-fluoro corresponding base
  modified_base (16)..(16): 2'-hydroxy corresponding base
  modified_base (17)..(17): 2'-deoxy-2'-fluoro corresponding base
  modified_base (18)..(18): 2'-deoxy-2'-fluoro corresponding base
  modified_base (19)..(19): 2'-deoxy-2'-fluoro corresponding base
  modified_base (20)..(20): deoxythymidine
  modified_base (21)..(21): 5'-thio thymidine
uucuagaccuguuuugcuutt

SEQ ID NO: 1234 - DNA, 21 bp, Artificial Sequence
  Description of Artificial Sequence: Synthetic oligonucleotide
  Description of Combined DNA/RNA Molecule: Synthetic oligonucleotide
  siRNAs to PCSK9
  modified_base (1)..(1): 2'-hydroxy corresponding base
  modified_base (2)..(2): 2'-hydroxy corresponding base
  modified_base (3)..(3): 2'-hydroxy corresponding base
  modified_base (4)..(4): 2'-deoxy-2'-fluoro corresponding base
  modified_base (5)..(5): 2'-hydroxy corresponding base
  modified_base (6)..(6): 2'-hydroxy corresponding base
  modified_base (7)..(7): 2'-hydroxy corresponding base
  modified_base (8)..(8): 2'-hydroxy corresponding base
  modified_base (9)..(9): 2'-deoxy-2'-fluoro corresponding base
  modified_base (10)..(10): 2'-hydroxy corresponding base
  modified_base (11)..(11): 2'-hydroxy corresponding base
  modified_base (12)..(12): 2'-hydroxy corresponding base
  modified_base (13)..(13): 2'-deoxy-2'-fluoro corresponding base
  modified_base (14)..(14): 2'-deoxy-2'-fluoro corresponding base
  modified_base (15)..(15): 2'-deoxy-2'-fluoro corresponding base
  modified_base (16)..(16): 2'-hydroxy corresponding base
  modified_base (17)..(17): 2'-hydroxy corresponding base
  modified_base (18)..(18): 2'-hydroxy corresponding base
  modified_base (19)..(19): 2'-hydroxy corresponding base
  modified_base (20)..(20): deoxythymidine
  modified_base (21)..(21): 5'-thio thymidine
aagcaaaacaggucuagaatt

SEQ ID NO: 1235 - DNA, 21 bp, Artificial Sequence
  Description of Artificial Sequence: Synthetic oligonucleotide
  Description of Combined DNA/RNA Molecule: Synthetic oligonucleotide
  siRNAs to PCSK9
  modified_base (1)..(1): 2'-hydroxy corresponding base
  modified_base (2)..(2): 2'-O-methyl corresponding base
  modified_base (3)..(3): 2'-hydroxy corresponding base
  modified_base (4)..(4): 2'-O-methyl corresponding base
  modified_base (5)..(5): 2'-hydroxy corresponding base
  modified_base (6)..(6): 2'-O-methyl corresponding base
  modified_base (7)..(7): 2'-hydroxy corresponding base
  modified_base (8)..(8): 2'-O-methyl corresponding base
  modified_base (9)..(9): 2'-hydroxy corresponding base
  modified_base (10)..(10): 2'-O-methyl corresponding base
  modified_base (11)..(11): 2'-hydroxy corresponding base
  modified_base (12)..(12): 2'-O-methyl corresponding base
  modified_base (13)..(13): 2'-hydroxy corresponding base
  modified_base (14)..(14): 2'-O-methyl corresponding base
  modified_base (15)..(15): 2'-hydroxy corresponding base
  modified_base (16)..(16): 2'-O-methyl corresponding base
  modified_base (17)..(17): 2'-hydroxy corresponding base
  modified_base (18)..(18): 2'-O-methyl corresponding base
  modified_base (19)..(19): 2'-hydroxy corresponding base
  modified_base (20)..(20): deoxythymidine
  modified_base (21)..(21): 5'-thio thymidine
uucuagaccuguuuugcuutt

SEQ ID NO: 1236 - DNA, 21 bp, Artificial Sequence
  Description of Artificial Sequence: Synthetic oligonucleotide
  Description of Combined DNA/RNA Molecule: Synthetic oligonucleotide
  siRNAs to PCSK9
  modified_base (1)..(1): 2'-O-methyl corresponding base
  modified_base (2)..(2): 2'-deoxy-2'-fluoro corresponding base
  modified_base (3)..(3): 2'-O-methyl corresponding base
  modified_base (4)..(4): 2'-deoxy-2'-fluoro corresponding base
  modified_base (5)..(5): 2'-O-methyl corresponding base
  modified_base (6)..(6): 2'-deoxy-2'-fluoro corresponding base
  modified_base (7)..(7): 2'-O-methyl corresponding base
  modified_base (8)..(8): 2'-deoxy-2'-fluoro corresponding base
  modified_base (9)..(9): 2'-O-methyl corresponding base
  modified_base (10)..(10): 2'-deoxy-2'-fluoro corresponding base
  modified_base (11)..(11): 2'-O-methyl corresponding base
  modified_base (12)..(12): 2'-deoxy-2'-fluoro corresponding base
  modified_base (13)..(13): 2'-O-methyl corresponding base
  modified_base (14)..(14): 2'-deoxy-2'-fluoro corresponding base
  modified_base (15)..(15): 2'-O-methyl corresponding base
  modified_base (16)..(16): 2'-deoxy-2'-fluoro corresponding base
  modified_base (17)..(17): 2'-O-methyl corresponding base
  modified_base (18)..(18): 2'-deoxy-2'-fluoro corresponding base
  modified_base (19)..(19): 2'-O-methyl corresponding base
  modified_base (20)..(20): deoxythymidine
  modified_base (21)..(21): 5'-thio thymidine
aagcaaaacaggucuagaatt

SEQ ID NO: 1237 - DNA, 21 bp, Artificial Sequence
  Description of Artificial Sequence: Synthetic oligonucleotide
  Description of Combined DNA/RNA Molecule: Synthetic oligonucleotide
  siRNAs to PCSK9
  modified_base (1)..(1): 2'-hydroxy corresponding base
  modified_base (2)..(2): 2'-O-methyl corresponding base
  modified_base (3)..(3): 2'-hydroxy corresponding base
  modified_base (4)..(4): 2'-O-methyl corresponding base
  modified_base (5)..(5): 2'-hydroxy corresponding base
  modified_base (6)..(6): 2'-O-methyl corresponding base
  modified_base (7)..(7): 2'-hydroxy corresponding base
  modified_base (8)..(8): 2'-O-methyl corresponding base
  modified_base (9)..(9): 2'-hydroxy corresponding base
  modified_base (10)..(10): 2'-O-methyl corresponding base
  modified_base (11)..(11): 2'-hydroxy corresponding base
  modified_base (12)..(12): 2'-O-methyl corresponding base
  modified_base (13)..(13): 2'-hydroxy corresponding base
  modified_base (14)..(14): 2'-O-methyl corresponding base
  modified_base (15)..(15): 2'-hydroxy corresponding base
  modified_base (16)..(16): 2'-O-methyl corresponding base
  modified_base (17)..(17): 2'-hydroxy corresponding base
  modified_base (18)..(18): 2'-O-methyl corresponding base
  modified_base (19)..(19): 2'-hydroxy corresponding base
  modified_base (20)..(20): deoxythymidine
  modified_base (21)..(21): 5'-thio thymidine
uucuagaccuguuuugcuutt

SEQ ID NO: 1238 - DNA, 21 bp, Artificial Sequence
  Description of Artificial Sequence: Synthetic oligonucleotide
  Description of Combined DNA/RNA Molecule: Synthetic oligonucleotide
  siRNAs to PCSK9
  modified_base (1)..(1): 2'-hydroxy corresponding base
  modified_base (2)..(2): 2'-hydroxy corresponding base
  modified_base (3)..(3): 2'-hydroxy corresponding base
  modified_base (4)..(4): 2'-deoxy-2'-fluoro corresponding base
  modified_base (5)..(5): 2'-hydroxy corresponding base
  modified_base (6)..(6): 2'-hydroxy corresponding base
  modified_base (7)..(7): 2'-hydroxy corresponding base
  modified_base (8)..(8): 2'-hydroxy corresponding base
  modified_base (9)..(9): 2'-deoxy-2'-fluoro corresponding base
  modified_base (10)..(10): 2'-hydroxy corresponding base
  modified_base (11)..(11): 2'-hydroxy corresponding base
  modified_base (12)..(12): 2'-hydroxy corresponding base
  modified_base (13)..(13): 2'-deoxy-2'-fluoro corresponding base
  modified_base (14)..(14): 2'-deoxy-2'-fluoro corresponding base
  modified_base (15)..(15): 2'-deoxy-2'-fluoro corresponding base
  modified_base (16)..(16): 2'-hydroxy corresponding base
  modified_base (17)..(17): 2'-hydroxy corresponding base
  modified_base (18)..(18): 2'-hydroxy corresponding base
  modified_base (19)..(19): 2'-hydroxy corresponding base
  modified_base (20)..(20): deoxythymidine
  modified_base (21)..(21): 5'-thio thymidine
aagcaaaacaggucuagaatt

SEQ ID NO: 1239 - DNA, 20 bp, Artificial Sequence
  Description of Artificial Sequence: Synthetic oligonucleotide
  Description of Combined DNA/RNA Molecule: Synthetic oligonucleotide
  siRNAs to PCSK9
  modified_base (1)..(1): 2'-deoxy-2'-fluoro corresponding base
  modified_base (2)..(2): 2'-O-methyl corresponding base
  modified_base (3)..(3): 2'-deoxy-2'-fluoro corresponding base
  modified_base (4)..(4): 2'-O-methyl corresponding base
  modified_base (5)..(5): 2'-deoxy-2'-fluoro corresponding base
  modified_base (6)..(6): 2'-O-methyl corresponding base
  modified_base (7)..(7): 2'-deoxy-2'-fluoro corresponding base
  modified_base (8)..(8): 2'-O-methyl corresponding base
  modified_base (9)..(9): 2'-deoxy-2'-fluoro corresponding base
  modified_base (10)..(10): 2'-O-methyl corresponding base
  modified_base (11)..(11): 2'-deoxy-2'-fluoro corresponding base
  modified_base (12)..(12): 2'-O-methyl corresponding base
  modified_base (13)..(13): 2'-deoxy-2'-fluoro corresponding base
  modified_base (14)..(14): 2'-O-methyl corresponding base
  modified_base (15)..(15): 2'-deoxy-2'-fluoro corresponding base
  modified_base (16)..(16): 2'-deoxy-2'-fluoro corresponding base
  modified_base (17)..(17): 2'-O-methyl corresponding base
  modified_base (18)..(18): 2'-deoxy-2'-fluoro corresponding base
  modified_base (19)..(19): deoxythymidine
  modified_base (20)..(20): 5'-thio thymidine
uucuagaccuguuuucuutt

SEQ ID NO: 1240 - DNA, 21 bp, Artificial Sequence
  Description of Artificial Sequence: Synthetic oligonucleotide
  Description of Combined DNA/RNA Molecule: Synthetic oligonucleotide
  siRNAs to PCSK9
  modified_base (1)..(1): 2'-hydroxy corresponding base
  modified_base (2)..(2): 2'-hydroxy corresponding base
  modified_base (3)..(3): 2'-hydroxy corresponding base
  modified_base (4)..(4): 2'-O-methyl corresponding base
  modified_base (5)..(5): 2'-hydroxy corresponding base
  modified_base (6)..(6): 2'-O-methyl corresponding base
  modified_base (7)..(7): 2'-O-methyl corresponding base
  modified_base (8)..(8): 2'-hydroxy corresponding base
  modified_base (9)..(9): 2'-hydroxy corresponding base
  modified_base (10)..(10): 2'-O-methyl corresponding base
  modified_base (11)..(11): 2'-O-methyl corresponding base
  modified_base (12)..(12): 2'-hydroxy corresponding base
  modified_base (13)..(13): 2'-hydroxy corresponding base
  modified_base (14)..(14): 2'-hydroxy corresponding base
  modified_base (15)..(15): 2'-hydroxy corresponding base
  modified_base (16)..(16): 2'-hydroxy corresponding base
  modified_base (17)..(17): 2'-O-methyl corresponding base
  modified_base (18)..(18): 2'-O-methyl corresponding base
  modified_base (19)..(19): 2'-O-methyl corresponding base
  modified_base (20)..(20): deoxythymidine
  modified_base (21)..(21): 5'-thio thymidine
aagcaaaacaggucuagaatt

SEQ ID NO: 1241 - DNA, 21 bp, Artificial Sequence
  Description of Artificial Sequence: Synthetic oligonucleotide
  Description of Combined DNA/RNA Molecule: Synthetic oligonucleotide
  siRNAs to PCSK9
  modified_base (1)..(1): 2'-deoxy-2'-fluoro corresponding base
  modified_base (2)..(2): 2'-deoxy-2'-fluoro corresponding base
  modified_base (3)..(3): 2'-deoxy-2'-fluoro corresponding base
  modified_base (4)..(4): 2'-deoxy-2'-fluoro corresponding base
  modified_base (5)..(5): 2'-hydroxy corresponding base
  modified_base (6)..(6): 2'-hydroxy corresponding base
  modified_base (7)..(7): 2'-hydroxy corresponding base
  modified_base (8)..(8): 2'-deoxy-2'-fluoro corresponding base
  modified_base (9)..(9): 2'-deoxy-2'-fluoro corresponding base
  modified_base (10)..(10): 2'-deoxy-2'-fluoro corresponding base
  modified_base (11)..(11): 2'-hydroxy corresponding base
  modified_base (12)..(12): 2'-deoxy-2'-fluoro corresponding base
  modified_base (13)..(13): 2'-deoxy-2'-fluoro corresponding base
  modified_base (14)..(14): 2'-deoxy-2'-fluoro corresponding base
  modified_base (15)..(15): 2'-deoxy-2'-fluoro corresponding base
  modified_base (16)..(16): 2'-hydroxy corresponding base
  modified_base (17)..(17): 2'-deoxy-2'-fluoro corresponding base
  modified_base (18)..(18): 2'-deoxy-2'-fluoro corresponding base
  modified_base (19)..(19): 2'-deoxy-2'-fluoro corresponding base
  modified_base (20)..(20): deoxythymidine
  modified_base (21)..(21): 5'-thio thymidine
uucuagaccuguuuugcuutt

SEQ ID NO: 1242 - DNA, 21 bp, Artificial Sequence
  Description of Artificial Sequence: Synthetic oligonucleotide
  Description of Combined DNA/RNA Molecule: Synthetic oligonucleotide
  siRNAs to PCSK9
  modified_base (1)..(1): 2'-hydroxy corresponding base
  modified_base (2)..(2): 2'-hydroxy corresponding base
  modified_base (3)..(3): 2'-hydroxy corresponding base
  modified_base (4)..(4): 2'-O-methyl corresponding base
  modified_base (5)..(5): 2'-hydroxy corresponding base
  modified_base (6)..(6): 2'-O-methyl corresponding base
  modified_base (7)..(7): 2'-O-methyl corresponding base
  modified_base (8)..(8): 2'-hydroxy corresponding base
  modified_base (9)..(9): 2'-hydroxy corresponding base
  modified_base (10)..(10): 2'-O-methyl corresponding base
  modified_base (11)..(11): 2'-O-methyl corresponding base
  modified_base (12)..(12): 2'-hydroxy corresponding base
  modified_base (13)..(13): 2'-hydroxy corresponding base
  modified_base (14)..(14): 2'-hydroxy corresponding base
  modified_base (15)..(15): 2'-hydroxy corresponding base
  modified_base (16)..(16): 2'-hydroxy corresponding base
  modified_base (17)..(17): 2'-O-methyl corresponding base
  modified_base (18)..(18): 2'-O-methyl corresponding base
  modified_base (19)..(19): 2'-O-methyl corresponding base
  modified_base (20)..(20): deoxythymidine
  modified_base (21)..(21): 5'-thio thymidine
aagcaaaacaggucuagaatt

SEQ ID NO: 1243 - DNA, 21 bp, Artificial Sequence
  Description of Artificial Sequence: Synthetic oligonucleotide
  Description of Combined DNA/RNA Molecule: Synthetic oligonucleotide
  siRNAs to PCSK9
  modified_base (1)..(1): 2'-hydroxy corresponding base
  modified_base (2)..(2): 2'-O-methyl corresponding base
  modified_base (3)..(3): 2'-hydroxy corresponding base
  modified_base (4)..(4): 2'-O-methyl corresponding base
  modified_base (5)..(5): 2'-hydroxy corresponding base
  modified_base (6)..(6): 2'-O-methyl corresponding base
  modified_base (7)..(7): 2'-hydroxy corresponding base
  modified_base (8)..(8): 2'-O-methyl corresponding base
  modified_base (9)..(9): 2'-hydroxy corresponding base
  modified_base (10)..(10): 2'-O-methyl corresponding base
  modified_base (11)..(11): 2'-hydroxy corresponding base
  modified_base (12)..(12): 2'-O-methyl corresponding base
  modified_base (13)..(13): 2'-hydroxy corresponding base
  modified_base (14)..(14): 2'-O-methyl corresponding base
  modified_base (15)..(15): 2'-hydroxy corresponding base
  modified_base (16)..(16): 2'-O-methyl corresponding base
  modified_base (17)..(17): 2'-hydroxy corresponding base
  modified_base (18)..(18): 2'-O-methyl corresponding base
  modified_base (19)..(19): 2'-hydroxy corresponding base
  modified_base (20)..(20): deoxythymidine
  modified_base (21)..(21): 5'-thio thymidine
uucuagaccuguuuugcuutt

SEQ ID NO: 1244 - DNA, 21 bp, Artificial Sequence
  Description of Artificial Sequence: Synthetic oligonucleotide
  Description of Combined DNA/RNA Molecule: Synthetic oligonucleotide
  siRNAs to PCSK9
  modified_base (1)..(1): 2'-hydroxy corresponding base
  modified_base (2)..(2): 2'-hydroxy corresponding base
  modified_base (3)..(3): 2'-hydroxy corresponding base
  modified_base (4)..(4): 2'-O-methyl corresponding base
  modified_base (5)..(5): 2'-hydroxy corresponding base
  modified_base (6)..(6): 2'-O-methyl corresponding base
  modified_base (7)..(7): 2'-O-methyl corresponding base
  modified_base (8)..(8): 2'-hydroxy corresponding base
  modified_base (9)..(9): 2'-hydroxy corresponding base
  modified_base (10)..(10): 2'-O-methyl corresponding base
  modified_base (11)..(11): 2'-O-methyl corresponding base
  modified_base (12)..(12): 2'-hydroxy corresponding base
  modified_base (13)..(13): 2'-hydroxy corresponding base
  modified_base (14)..(14): 2'-hydroxy corresponding base
  modified_base (15)..(15): 2'-hydroxy corresponding base
  modified_base (16)..(16): 2'-hydroxy corresponding base
  modified_base (17)..(17): 2'-O-methyl corresponding base
  modified_base (18)..(18): 2'-O-methyl corresponding base
  modified_base (19)..(19): 2'-O-methyl corresponding base
  modified_base (20)..(20): deoxythymidine
  modified_base (21)..(21): 5'-thio thymidine
aagcaaaacaggucuagaatt

SEQ ID NO: 1245 - DNA, 21 bp, Artificial Sequence
  Description of Artificial Sequence: Synthetic oligonucleotide
  Description of Combined DNA/RNA Molecule: Synthetic oligonucleotide
  siRNAs to PCSK9
  modified_base (1)..(1): 2'-deoxy-2'-fluoro corresponding base
  modified_base (2)..(2): 2'-O-methyl corresponding base
  modified_base (3)..(3): 2'-deoxy-2'-fluoro corresponding base
  modified_base (4)..(4): 2'-O-methyl corresponding base
  modified_base (5)..(5): 2'-deoxy-2'-fluoro corresponding base
  modified_base (6)..(6): 2'-O-methyl corresponding base
  modified_base (7)..(7): 2'-deoxy-2'-fluoro corresponding base
  modified_base (8)..(8): 2'-O-methyl corresponding base
  modified_base (9)..(9): 2'-deoxy-2'-fluoro corresponding base
  modified_base (10)..(10): 2'-O-methyl corresponding base
  modified_base (11)..(11): 2'-deoxy-2'-fluoro corresponding base
  modified_base (12)..(12): 2'-O-methyl corresponding base
  modified_base (13)..(13): 2'-deoxy-2'-fluoro corresponding base
  modified_base (14)..(14): 2'-O-methyl corresponding base
  modified_base (15)..(15): 2'-deoxy-2'-fluoro corresponding base
  modified_base (16)..(16): 2'-O-methyl corresponding base
  modified_base (17)..(17): 2'-deoxy-2'-fluoro corresponding base
  modified_base (18)..(18): 2'-O-methyl corresponding base
  modified_base (19)..(19): 2'-deoxy-2'-fluoro corresponding base
  modified_base (20)..(20): deoxythymidine
  modified_base (21)..(21): 5'-thio thymidine
cauaggccuggaguuuauutt

SEQ ID NO: 1246 - DNA, 21 bp, Artificial Sequence
  Description of Artificial Sequence: Synthetic oligonucleotide
  Description of Combined DNA/RNA Molecule: Synthetic oligonucleotide
  siRNAs to PCSK9
  modified_base (1)..(1): 2'-O-methyl corresponding base
  modified_base (2)..(2): 2'-deoxy-2'-fluoro corresponding base
  modified_base (3)..(3): 2'-O-methyl corresponding base
  modified_base (4)..(4): 2'-deoxy-2'-fluoro corresponding base
  modified_base (5)..(5): 2'-O-methyl corresponding base
  modified_base (6)..(6): 2'-deoxy-2'-fluoro corresponding base
  modified_base (7)..(7): 2'-O-methyl corresponding base
  modified_base (8)..(8): 2'-deoxy-2'-fluoro corresponding base
  modified_base (9)..(9): 2'-O-methyl corresponding base
  modified_base (10)..(10): 2'-deoxy-2'-fluoro corresponding base
  modified_base (11)..(11): 2'-O-methyl corresponding base
  modified_base (12)..(12): 2'-deoxy-2'-fluoro corresponding base
  modified_base (13)..(13): 2'-O-methyl corresponding base
  modified_base (14)..(14): 2'-deoxy-2'-fluoro corresponding base
  modified_base (15)..(15): 2'-O-methyl corresponding base
  modified_base (16)..(16): 2'-deoxy-2'-fluoro corresponding base
  modified_base (17)..(17): 2'-O-methyl corresponding base
  modified_base (18)..(18): 2'-deoxy-2'-fluoro corresponding base
  modified_base (19)..(19): 2'-O-methyl corresponding base
  modified_base (20)..(20): deoxythymidine
  modified_base (21)..(21): 5'-thio thymidine
aauaaacuccaggccuaugtt

SEQ ID NO: 1247 - DNA, 21 bp, Artificial Sequence
  Description of Artificial Sequence: Synthetic oligonucleotide
  Description of Combined DNA/RNA Molecule: Synthetic oligonucleotide
  siRNAs to PCSK9
  modified_base (1)..(1): 2'-deoxy-2'-fluoro corresponding base
  modified_base (2)..(2): 2'-hydroxy corresponding base
  modified_base (3)..(3): 2'-deoxy-2'-fluoro corresponding base
  modified_base (4)..(4): 2'-hydroxy corresponding base
  modified_base (5)..(5): 2'-hydroxy corresponding base
  modified_base (6)..(6): 2'-hydroxy corresponding base
  modified_base (7)..(7): 2'-deoxy-2'-fluoro corresponding base
  modified_base (8)..(8): 2'-deoxy-2'-fluoro corresponding base
  modified_base (9)..(9): 2'-deoxy-2'-fluoro corresponding base
  modified_base (10)..(10): 2'-hydroxy corresponding base
  modified_base (11)..(11): 2'-hydroxy corresponding base
  modified_base (12)..(12): 2'-hydroxy corresponding base
  modified_base (13)..(13): 2'-hydroxy corresponding base
  modified_base (14)..(14): 2'-deoxy-2'-fluoro corresponding base
  modified_base (15)..(15): 2'-deoxy-2'-fluoro corresponding base
  modified_base (16)..(16): 2'-deoxy-2'-fluoro corresponding base
  modified_base (17)..(17): 2'-hydroxy corresponding base
  modified_base (18)..(18): 2'-deoxy-2'-fluoro corresponding base
  modified_base (19)..(19): 2'-deoxy-2'-fluoro corresponding base
  modified_base (20)..(20): deoxythymidine
  modified_base (21)..(21): 5'-thio thymidine
cauaggccuggaguuuauutt

SEQ ID NO: 1248 - DNA, 21 bp, Artificial Sequence
  Description of Artificial Sequence: Synthetic oligonucleotide
  Description of Combined DNA/RNA Molecule: Synthetic oligonucleotide
  siRNAs to PCSK9
  modified_base (1)..(1): 2'-hydroxy corresponding base
  modified_base (2)..(2): 2'-hydroxy corresponding base
  modified_base (3)..(3): 2'-deoxy-2'-fluoro corresponding base
  modified_base (4)..(4): 2'-hydroxy corresponding base
  modified_base (5)..(5): 2'-hydroxy corresponding base
  modified_base (6)..(6): 2'-hydroxy corresponding base
  modified_base (7)..(7): 2'-deoxy-2'-fluoro corresponding base
  modified_base (8)..(8): 2'-deoxy-2'-fluoro corresponding base
  modified_base (9)..(9): 2'-deoxy-2'-fluoro corresponding base
  modified_base (10)..(10): 2'-deoxy-2'-fluoro corresponding base
  modified_base (11)..(11): 2'-hydroxy corresponding base
  modified_base (12)..(12): 2'-hydroxy corresponding base
  modified_base (13)..(13): 2'-hydroxy corresponding base
  modified_base (14)..(14): 2'-deoxy-2'-fluoro corresponding base
  modified_base (15)..(15): 2'-deoxy-2'-fluoro corresponding base
  modified_base (16)..(16): 2'-deoxy-2'-fluoro corresponding base
  modified_base (17)..(17): 2'-hydroxy corresponding base
  modified_base (18)..(18): 2'-deoxy-2'-fluoro corresponding base
  modified_base (19)..(19): 2'-hydroxy corresponding base
  modified_base (20)..(20): deoxythymidine
  modified_base (21)..(21): 5'-thio thymidine
aauaaacuccaggccuaugtt

SEQ ID NO: 1249 - DNA, 21 bp, Artificial Sequence
  Description of Artificial Sequence: Synthetic oligonucleotide
  Description of Combined DNA/RNA Molecule: Synthetic oligonucleotide
  siRNAs to PCSK9
  modified_base (1)..(1): 2'-hydroxy corresponding base
  modified_base (2)..(2): 2'-O-methyl corresponding base
  modified_base (3)..(3): 2'-hydroxy corresponding base
  modified_base (4)..(4): 2'-O-methyl corresponding base
  modified_base (5)..(5): 2'-hydroxy corresponding base
  modified_base (6)..(6): 2'-O-methyl corresponding base
  modified_base (7)..(7): 2'-hydroxy corresponding base
  modified_base (8)..(8): 2'-O-methyl corresponding base
  modified_base (9)..(9): 2'-hydroxy corresponding base
  modified_base (10)..(10): 2'-O-methyl corresponding base
  modified_base (11)..(11): 2'-hydroxy corresponding base
  modified_base (12)..(12): 2'-O-methyl corresponding base
  modified_base (13)..(13): 2'-hydroxy corresponding base
  modified_base (14)..(14): 2'-O-methyl corresponding base
  modified_base (15)..(15): 2'-hydroxy corresponding base
  modified_base (16)..(16): 2'-O-methyl corresponding base
  modified_base (17)..(17): 2'-hydroxy corresponding base
  modified_base (18)..(18): 2'-O-methyl corresponding base
  modified_base (19)..(19): 2'-hydroxy corresponding base
  modified_base (20)..(20): deoxythymidine
  modified_base (21)..(21): 5'-thio thymidine
cauaggccuggaguuuauutt

SEQ ID NO: 1250 - DNA, 21 bp, Artificial Sequence
  Description of Artificial Sequence: Synthetic oligonucleotide
  Description of Combined DNA/RNA Molecule: Synthetic oligonucleotide
  siRNAs to PCSK9
  modified_base (1)..(1): 2'-O-methyl corresponding base
  modified_base (2)..(2): 2'-deoxy-2'-fluoro corresponding base
  modified_base (3)..(3): 2'-O-methyl corresponding base
  modified_base (4)..(4): 2'-deoxy-2'-fluoro corresponding base
  modified_base (5)..(5): 2'-O-methyl corresponding base
  modified_base (6)..(6): 2'-deoxy-2'-fluoro corresponding base
  modified_base (7)..(7): 2'-O-methyl corresponding base
  modified_base (8)..(8): 2'-deoxy-2'-fluoro corresponding base
  modified_base (9)..(9): 2'-O-methyl corresponding base
  modified_base (10)..(10): 2'-deoxy-2'-fluoro corresponding base
  modified_base (11)..(11): 2'-O-methyl corresponding base
  modified_base (12)..(12): 2'-deoxy-2'-fluoro corresponding base
  modified_base (13)..(13): 2'-O-methyl corresponding base
  modified_base (14)..(14): 2'-deoxy-2'-fluoro corresponding base
  modified_base (15)..(15): 2'-O-methyl corresponding base
  modified_base (16)..(16): 2'-deoxy-2'-fluoro corresponding base
  modified_base (17)..(17): 2'-O-methyl corresponding base
  modified_base (18)..(18): 2'-deoxy-2'-fluoro corresponding base
  modified_base (19)..(19): 2'-O-methyl corresponding base
  modified_base (20)..(20): deoxythymidine
  modified_base (21)..(21): 5'-thio thymidine
aauaaacuccaggccuaugtt

SEQ ID NO: 1251 - DNA, 21 bp, Artificial Sequence
  Description of Artificial Sequence: Synthetic oligonucleotide
  Description of Combined DNA/RNA Molecule: Synthetic oligonucleotide
  siRNAs to PCSK9
  modified_base (1)..(1): 2'-hydroxy corresponding base
  modified_base (2)..(2): 2'-O-methyl corresponding base
  modified_base (3)..(3): 2'-hydroxy corresponding base
  modified_base (4)..(4): 2'-O-methyl corresponding base
  modified_base (5)..(5): 2'-hydroxy corresponding base
  modified_base (6)..(6): 2'-O-methyl corresponding base
  modified_base (7)..(7): 2'-hydroxy corresponding base
  modified_base (8)..(8): 2'-O-methyl corresponding base
  modified_base (9)..(9): 2'-hydroxy corresponding base
  modified_base (10)..(10): 2'-O-methyl corresponding base
  modified_base (11)..(11): 2'-hydroxy corresponding base
  modified_base (12)..(12): 2'-O-methyl corresponding base
  modified_base (13)..(13): 2'-hydroxy corresponding base
  modified_base (14)..(14): 2'-O-methyl corresponding base
  modified_base (15)..(15): 2'-hydroxy corresponding base
  modified_base (16)..(16): 2'-O-methyl corresponding base
  modified_base (17)..(17): 2'-hydroxy corresponding base
  modified_base (18)..(18): 2'-O-methyl corresponding base
  modified_base (19)..(19): 2'-hydroxy corresponding base
  modified_base (20)..(20): deoxythymidine
  modified_base (21)..(21): 5'-thio thymidine
cauaggccuggaguuuauutt

SEQ ID NO: 1252 - DNA, 21 bp, Artificial Sequence
  Description of Artificial Sequence: Synthetic oligonucleotide
  Description of Combined DNA/RNA Molecule: Synthetic oligonucleotide
  siRNAs to PCSK9
  modified_base (1)..(1): 2'-hydroxy corresponding base
  modified_base (2)..(2): 2'-hydroxy corresponding base
  modified_base (3)..(3): 2'-deoxy-2'-fluoro corresponding base
  modified_base (4)..(4): 2'-hydroxy corresponding base
  modified_base (5)..(5): 2'-hydroxy corresponding base
  modified_base (6)..(6): 2'-hydroxy corresponding base
  modified_base (7)..(7): 2'-deoxy-2'-fluoro corresponding base
  modified_base (8)..(8): 2'-deoxy-2'-fluoro corresponding base
  modified_base (9)..(9): 2'-deoxy-2'-fluoro corresponding base
  modified_base (10)..(10): 2'-deoxy-2'-fluoro corresponding base
  modified_base (11)..(11): 2'-hydroxy corresponding base
  modified_base (12)..(12): 2'-hydroxy corresponding base
  modified_base (13)..(13): 2'-hydroxy corresponding base
  modified_base (14)..(14): 2'-deoxy-2'-fluoro corresponding base
  modified_base (15)..(15): 2'-deoxy-2'-fluoro corresponding base
  modified_base (16)..(16): 2'-deoxy-2'-fluoro corresponding base
  modified_base (17)..(17): 2'-hydroxy corresponding base
  modified_base (18)..(18): 2'-deoxy-2'-fluoro corresponding base
  modified_base (19)..(19): 2'-hydroxy corresponding base
  modified_base (20)..(20): deoxythymidine
  modified_base (21)..(21): 5'-thio thymidine
aauaaacuccaggccuaugtt

SEQ ID NO: 1253 - DNA, 21 bp, Artificial Sequence
  Description of Artificial Sequence: Synthetic oligonucleotide
  Description of Combined DNA/RNA Molecule: Synthetic oligonucleotide
  siRNAs to PCSK9
  modified_base (1)..(1): 2'-deoxy-2'-fluoro corresponding base
  modified_base (2)..(2): 2'-O-methyl corresponding base
  modified_base (3)..(3): 2'-deoxy-2'-fluoro corresponding base
  modified_base (4)..(4): 2'-O-methyl corresponding base
  modified_base (5)..(5): 2'-deoxy-2'-fluoro corresponding base
  modified_base (6)..(6): 2'-O-methyl corresponding base
  modified_base (7)..(7): 2'-deoxy-2'-fluoro corresponding base
  modified_base (8)..(8): 2'-O-methyl corresponding base
  modified_base (9)..(9): 2'-deoxy-2'-fluoro corresponding base
  modified_base (10)..(10): 2'-O-methyl corresponding base
  modified_base (11)..(11): 2'-deoxy-2'-fluoro corresponding base
  modified_base (12)..(12): 2'-O-methyl corresponding base
  modified_base (13)..(13): 2'-deoxy-2'-fluoro corresponding base
  modified_base (14)..(14): 2'-O-methyl corresponding base
  modified_base (15)..(15): 2'-deoxy-2'-fluoro corresponding base
  modified_base (16)..(16): 2'-O-methyl corresponding base
  modified_base (17)..(17): 2'-deoxy-2'-fluoro corresponding base
  modified_base (18)..(18): 2'-O-methyl corresponding base
  modified_base (19)..(19): 2'-deoxy-2'-fluoro corresponding base
  modified_base (20)..(20): deoxythymidine
  modified_base (21)..(21): 5'-thio thymidine
cauaggccuggaguuuauutt

SEQ ID NO: 1254 - DNA, 21 bp, Artificial Sequence
  Description of Artificial Sequence: Synthetic oligonucleotide
  Description of Combined DNA/RNA Molecule: Synthetic oligonucleotide
  siRNAs to PCSK9
  modified_base (1)..(1): 2'-hydroxy corresponding base
  modified_base (2)..(2): 2'-hydroxy corresponding base
  modified_base (3)..(3): 2'-hydroxy corresponding base
  modified_base (4)..(4): 2'-hydroxy corresponding base
  modified_base (5)..(5): 2'-hydroxy corresponding base
  modified_base (6)..(6): 2'-O-methyl corresponding base
  modified_base (7)..(7): 2'-O-methyl corresponding base
  modified_base (8)..(8): 2'-hydroxy corresponding base
  modified_base (9)..(9): 2'-hydroxy corresponding base
  modified_base (10)..(10): 2'-O-methyl corresponding base
  modified_base (11)..(11): 2'-O-methyl corresponding base
  modified_base (12)..(12): 2'-hydroxy corresponding base
  modified_base (13)..(13): 2'-hydroxy corresponding base
  modified_base (14)..(14): 2'-hydroxy corresponding base
  modified_base (15)..(15): 2'-hydroxy corresponding base
  modified_base (16)..(16): 2'-hydroxy corresponding base
  modified_base (17)..(17): 2'-O-methyl corresponding base
  modified_base (18)..(18): 2'-O-methyl corresponding base
  modified_base (19)..(19): 2'-O-methyl corresponding base
  modified_base (20)..(20): deoxythymidine
  modified_base (21)..(21): 5'-thio thymidine
aauaaacuccaggccuaugtt

SEQ ID NO: 1255 - DNA, 21 bp, Artificial Sequence
  Description of Artificial Sequence: Synthetic oligonucleotide
  Description of Combined DNA/RNA Molecule: Synthetic oligonucleotide
  siRNAs to PCSK9
  modified_base (1)..(1): 2'-deoxy-2'-fluoro corresponding base
  modified_base (2)..(2): 2'-hydroxy corresponding base
  modified_base (3)..(3): 2'-deoxy-2'-fluoro corresponding base
  modified_base (4)..(4): 2'-hydroxy corresponding base
  modified_base (5)..(5): 2'-hydroxy corresponding base
  modified_base (6)..(6): 2'-hydroxy corresponding base
  modified_base (7)..(7): 2'-deoxy-2'-fluoro corresponding base
  modified_base (8)..(8): 2'-deoxy-2'-fluoro corresponding base
  modified_base (9)..(9): 2'-deoxy-2'-fluoro corresponding base
  modified_base (10)..(10): 2'-hydroxy corresponding base
  modified_base (11)..(11): 2'-hydroxy corresponding base
  modified_base (12)..(12): 2'-hydroxy corresponding base
  modified_base (13)..(13): 2'-hydroxy corresponding base
  modified_base (14)..(14): 2'-deoxy-2'-fluoro corresponding base
  modified_base (15)..(15): 2'-deoxy-2'-fluoro corresponding base
  modified_base (16)..(16): 2'-deoxy-2'-fluoro corresponding base
  modified_base (17)..(17): 2'-hydroxy corresponding base
  modified_base (18)..(18): 2'-deoxy-2'-fluoro corresponding base
  modified_base (19)..(19): 2'-deoxy-2'-fluoro corresponding base
  modified_base (20)..(20): deoxythymidine
  modified_base (21)..(21): 5'-thio thymidine
cauaggccuggaguuuauutt

SEQ ID NO: 1256 - DNA, 21 bp, Artificial Sequence
  Description of Artificial Sequence: Synthetic oligonucleotide
  Description of Combined DNA/RNA Molecule: Synthetic oligonucleotide
  siRNAs to PCSK9
  modified_base (1)..(1): 2'-hydroxy corresponding base
  modified_base (2)..(2): 2'-hydroxy corresponding base
  modified_base (3)..(3): 2'-hydroxy corresponding base
  modified_base (4)..(4): 2'-hydroxy corresponding base
  modified_base (5)..(5): 2'-hydroxy corresponding base
  modified_base (6)..(6): 2'-O-methyl corresponding base
  modified_base (7)..(7): 2'-O-methyl corresponding base
  modified_base (8)..(8): 2'-hydroxy corresponding base
  modified_base (9)..(9): 2'-hydroxy corresponding base
  modified_base (10)..(10): 2'-O-methyl corresponding base
  modified_base (11)..(11): 2'-O-methyl corresponding base
  modified_base (12)..(12): 2'-hydroxy corresponding base
  modified_base (13)..(13): 2'-hydroxy corresponding base
  modified_base (14)..(14): 2'-hydroxy corresponding base
  modified_base (15)..(15): 2'-hydroxy corresponding base
  modified_base (16)..(16): 2'-hydroxy corresponding base
  modified_base (17)..(17): 2'-O-methyl corresponding base
  modified_base (18)..(18): 2'-O-methyl corresponding base
  modified_base (19)..(19): 2'-O-methyl corresponding base
  modified_base (20)..(20): deoxythymidine
  modified_base (21)..(21): 5'-thio thymidine
aauaaacuccaggccuaugtt

SEQ ID NO: 1257 - DNA, 21 bp, Artificial Sequence
  Description of Artificial Sequence: Synthetic oligonucleotide
  Description of Combined DNA/RNA Molecule: Synthetic oligonucleotide
  siRNAs to PCSK9
  modified_base (1)..(1): 2'-hydroxy corresponding base
  modified_base (2)..(2): 2'-O-methyl corresponding base
  modified_base (3)..(3): 2'-hydroxy corresponding base
  modified_base (4)..(4): 2'-O-methyl corresponding base
  modified_base (5)..(5): 2'-hydroxy corresponding base
  modified_base (6)..(6): 2'-O-methyl corresponding base
  modified_base (7)..(7): 2'-hydroxy corresponding base
  modified_base (8)..(8): 2'-O-methyl corresponding base
  modified_base (9)..(9): 2'-hydroxy corresponding base
  modified_base (10)..(10): 2'-O-methyl corresponding base
  modified_base (11)..(11): 2'-hydroxy corresponding base
  modified_base (12)..(12): 2'-O-methyl corresponding base
  modified_base (13)..(13): 2'-hydroxy corresponding base
  modified_base (14)..(14): 2'-O-methyl corresponding base
  modified_base (15)..(15): 2'-hydroxy corresponding base
  modified_base (16)..(16): 2'-O-methyl corresponding base
  modified_base (17)..(17): 2'-hydroxy corresponding base
  modified_base (18)..(18): 2'-O-methyl corresponding base
  modified_base (19)..(19): 2'-hydroxy corresponding base
  modified_base (20)..(20): deoxythymidine
  modified_base (21)..(21): 5'-thio thymidine
cauaggccuggaguuuauutt

SEQ ID NO: 1258 - DNA, 21 bp, Artificial Sequence
  Description of Artificial Sequence: Synthetic oligonucleotide
  Description of Combined DNA/RNA Molecule: Synthetic oligonucleotide
  siRNAs to PCSK9
  modified_base (1)..(1): 2'-hydroxy corresponding base
  modified_base (2)..(2): 2'-hydroxy corresponding base
  modified_base (3)..(3): 2'-hydroxy corresponding base
  modified_base (4)..(4): 2'-hydroxy corresponding base
  modified_base (5)..(5): 2'-hydroxy corresponding base
  modified_base (6)..(6): 2'-O-methyl corresponding base
  modified_base (7)..(7): 2'-O-methyl corresponding base
  modified_base (8)..(8): 2'-hydroxy corresponding base
  modified_base (9)..(9): 2'-hydroxy corresponding base
  modified_base (10)..(10): 2'-O-methyl corresponding base
  modified_base (11)..(11): 2'-O-methyl corresponding base
  modified_base (12)..(12): 2'-hydroxy corresponding base
  modified_base (13)..(13): 2'-hydroxy corresponding base
  modified_base (14)..(14): 2'-hydroxy corresponding base
  modified_base (15)..(15): 2'-hydroxy corresponding base
  modified_base (16)..(16): 2'-hydroxy corresponding base
  modified_base (17)..(17): 2'-O-methyl corresponding base
  modified_base (18)..(18): 2'-O-methyl corresponding base
  modified_base (19)..(19): 2'-O-methyl corresponding base
  modified_base (20)..(20): deoxythymidine
  modified_base (21)..(21): 5'-thio thymidine
aauaaacuccaggccuaugtt

SEQ ID NO: 1259 - DNA, 21 bp, Artificial Sequence
  Description of Artificial Sequence: Synthetic oligonucleotide
  Description of Combined DNA/RNA Molecule: Synthetic oligonucleotide
  siRNAs to PCSK9
  modified_base (1)..(1): 2'-hydroxy corresponding base
  modified_base (2)..(2): 2'-hydroxy corresponding base
  modified_base (3)..(3): 2'-hydroxy corresponding base
  modified_base (4)..(4): 2'-hydroxy corresponding base
  modified_base (5)..(5): 2'-hydroxy corresponding base
  modified_base (6)..(6): 2'-hydroxy corresponding base
  modified_base (7)..(7): 2'-hydroxy corresponding base
  modified_base (8)..(8): 2'-hydroxy corresponding base
  modified_base (9)..(9): 2'-hydroxy corresponding base
  modified_base (10)..(10): 2'-hydroxy corresponding base
  modified_base (11)..(11): 2'-hydroxy corresponding base
  modified_base (12)..(12): 2'-hydroxy corresponding base
  modified_base (13)..(13): 2'-hydroxy corresponding base
  modified_base (14)..(14): 2'-hydroxy corresponding base
  modified_base (15)..(15): 2'-hydroxy corresponding base
  modified_base (16)..(16): 2'-hydroxy corresponding base
  modified_base (17)..(17): 2'-hydroxy corresponding base
  modified_base (18)..(18): 2'-hydroxy corresponding base
  modified_base (19)..(19): 2'-hydroxy corresponding base
  modified_base (20)..(20): deoxythymidine
  modified_base (21)..(21): 5'-thio thymidine
ucuagaccuguuuugcuuutt

SEQ ID NO: 1260 - DNA, 21 bp, Artificial Sequence
  Description of Artificial Sequence: Synthetic oligonucleotide
  Description of Combined DNA/RNA Molecule: Synthetic oligonucleotide
  siRNAs to PCSK9
  modified_base (1)..(1): 2'-hydroxy corresponding base
  modified_base (2)..(2): 2'-hydroxy corresponding base
  modified_base (3)..(3): 2'-hydroxy corresponding base
  modified_base (4)..(4): 2'-hydroxy corresponding base
  modified_base (5)..(5): 2'-hydroxy corresponding base
  modified_base (6)..(6): 2'-hydroxy corresponding base
  modified_base (7)..(7): 2'-hydroxy corresponding base
  modified_base (8)..(8): 2'-hydroxy corresponding base
  modified_base (9)..(9): 2'-hydroxy corresponding base
  modified_base (10)..(10): 2'-hydroxy corresponding base
  modified_base (11)..(11): 2'-hydroxy corresponding base
  modified_base (12)..(12): 2'-hydroxy corresponding base
  modified_base (13)..(13): 2'-hydroxy corresponding base
  modified_base (14)..(14): 2'-hydroxy corresponding base
  modified_base (15)..(15): 2'-hydroxy corresponding base
  modified_base (16)..(16): 2'-hydroxy corresponding base
  modified_base (17)..(17): 2'-hydroxy corresponding base
  modified_base (18)..(18): 2'-hydroxy corresponding base
  modified_base (19)..(19): 2'-hydroxy corresponding base
  modified_base (20)..(20): deoxythymidine
  modified_base (21)..(21): 5'-thio thymidine
aaagcaaaacaggucuagatt

SEQ ID NO: 1261 - DNA, 21 bp, Artificial Sequence
  Description of Artificial Sequence: Synthetic oligonucleotide
  Description of Combined DNA/RNA Molecule: Synthetic oligonucleotide
  siRNAs to PCSK9
  modified_base (1)..(1): 2'-O-methyl corresponding base
  modified_base (2)..(2): 2'-O-methyl corresponding base
  modified_base (3)..(3): 2'-O-methyl corresponding base
  modified_base (4)..(4): 2'-hydroxy corresponding base
  modified_base (5)..(5): 2'-hydroxy corresponding base
  modified_base (6)..(6): 2'-hydroxy corresponding base
  modified_base (7)..(7): 2'-O-methyl corresponding base
  modified_base (8)..(8): 2'-O-methyl corresponding base
  modified_base (9)..(9): 2'-O-methyl corresponding base
  modified_base (10)..(10): 2'-hydroxy corresponding base
  modified_base (11)..(11): 2'-O-methyl corresponding base
  modified_base (12)..(12): 2'-O-methyl corresponding base
  modified_base (13)..(13): 2'-O-methyl corresponding base
  modified_base (14)..(14): 2'-O-methyl corresponding base
  modified_base (15)..(15): 2'-hydroxy corresponding base
  modified_base (16)..(16): 2'-O-methyl corresponding base
  modified_base (17)..(17): 2'-O-methyl corresponding base
  modified_base (18)..(18): 2'-O-methyl corresponding base
  modified_base (19)..(19): 2'-O-methyl corresponding base
  modified_base (20)..(20): deoxythymidine
  modified_base (21)..(21): 5'-thio thymidine
ucuagaccuguuuugcuuutt

SEQ ID NO: 1262 - DNA, 21 bp, Artificial Sequence
  Description of Artificial Sequence: Synthetic oligonucleotide
  Description of Combined DNA/RNA Molecule: Synthetic oligonucleotide
  siRNAs to PCSK9
  modified_base (1)..(1): 2'-hydroxy corresponding base
  modified_base (2)..(2): 2'-hydroxy corresponding base
  modified_base (3)..(3): 2'-hydroxy corresponding base
  modified_base (4)..(4): 2'-hydroxy corresponding base
  modified_base (5)..(5): 2'-O-methyl corresponding base
  modified_base (6)..(6): 2'-hydroxy corresponding base
  modified_base (7)..(7): 2'-hydroxy corresponding base
  modified_base (8)..(8): 2'-hydroxy corresponding base
  modified_base (9)..(9): 2'-hydroxy corresponding base
  modified_base (10)..(10): 2'-O-methyl corresponding base
  modified_base (11)..(11): 2'-hydroxy corresponding base
  modified_base (12)..(12): 2'-hydroxy corresponding base
  modified_base (13)..(13): 2'-hydroxy corresponding base
  modified_base (14)..(14): 2'-hydroxy corresponding base
  modified_base (15)..(15): 2'-hydroxy corresponding base
  modified_base (16)..(16): 2'-O-methyl corresponding base
  modified_base (17)..(17): 2'-hydroxy corresponding base
  modified_base (18)..(18): 2'-hydroxy corresponding base
  modified_base (19)..(19): 2'-hydroxy corresponding base
  modified_base (20)..(20): deoxythymidine
  modified_base (21)..(21): 5'-thio thymidine
aaagcaaaacaggucuagatt

SEQ ID NO: 1263 - DNA, 21 bp, Artificial Sequence
  Description of Artificial Sequence: Synthetic oligonucleotide
  Description of Combined DNA/RNA Molecule: Synthetic oligonucleotide
  siRNAs to PCSK9
  modified_base (1)..(1): 2'-deoxy-2'-fluoro corresponding base
  modified_base (2)..(2): 2'-O-methyl corresponding base
  modified_base (3)..(3): 2'-deoxy-2'-fluoro corresponding base
  modified_base (4)..(4): 2'-O-methyl corresponding base
  modified_base (5)..(5): 2'-deoxy-2'-fluoro corresponding base
  modified_base (6)..(6): 2'-O-methyl corresponding base
  modified_base (7)..(7): 2'-deoxy-2'-fluoro corresponding base
  modified_base (8)..(8): 2'-O-methyl corresponding base
  modified_base (9)..(9): 2'-deoxy-2'-fluoro corresponding base
  modified_base (10)..(10): 2'-O-methyl corresponding base
  modified_base (11)..(11): 2'-deoxy-2'-fluoro corresponding base
  modified_base (12)..(12): 2'-O-methyl corresponding base
  modified_base (13)..(13): 2'-deoxy-2'-fluoro corresponding base
  modified_base (14)..(14): 2'-O-methyl corresponding base
  modified_base (15)..(15): 2'-deoxy-2'-fluoro corresponding base
  modified_base (16)..(16): 2'-O-methyl corresponding base
  modified_base (17)..(17): 2'-deoxy-2'-fluoro corresponding base
  modified_base (18)..(18): 2'-O-methyl corresponding base
  modified_base (19)..(19): 2'-deoxy-2'-fluoro corresponding base
  modified_base (20)..(20): deoxythymidine
  modified_base (21)..(21): 5'-thio thymidine
ucuagaccuguuuugcuuutt

SEQ ID NO: 1264 - DNA, 21 bp, Artificial Sequence
  Description of Artificial Sequence: Synthetic oligonucleotide
  Description of Combined DNA/RNA Molecule: Synthetic oligonucleotide
  siRNAs to PCSK9
  modified_base (1)..(1): 2'-O-methyl corresponding base
  modified_base (2)..(2): 2'-deoxy-2'-fluoro corresponding base
  modified_base (3)..(3): 2'-O-methyl corresponding base
  modified_base (4)..(4): 2'-deoxy-2'-fluoro corresponding base
  modified_base (5)..(5): 2'-O-methyl corresponding base
  modified_base (6)..(6): 2'-deoxy-2'-fluoro corresponding base
  modified_base (7)..(7): 2'-O-methyl corresponding base
  modified_base (8)..(8): 2'-deoxy-2'-fluoro corresponding base
  modified_base (9)..(9): 2'-O-methyl corresponding base
  modified_base (10)..(10): 2'-deoxy-2'-fluoro corresponding base
  modified_base (11)..(11): 2'-O-methyl corresponding base
  modified_base (12)..(12): 2'-deoxy-2'-fluoro corresponding base
  modified_base (13)..(13): 2'-O-methyl corresponding base
  modified_base (14)..(14): 2'-deoxy-2'-fluoro corresponding base
  modified_base (15)..(15): 2'-O-methyl corresponding base
  modified_base (16)..(16): 2'-deoxy-2'-fluoro corresponding base
  modified_base (17)..(17): 2'-O-methyl corresponding base
  modified_base (18)..(18): 2'-deoxy-2'-fluoro corresponding base
  modified_base (19)..(19): 2'-O-methyl corresponding base
  modified_base (20)..(20): deoxythymidine
  modified_base (21)..(21): 5'-thio thymidine
aaagcaaaacaggucuagatt

SEQ ID NO: 1265 - DNA, 21 bp, Artificial Sequence
  Description of Artificial Sequence: Synthetic oligonucleotide
  Description of Combined DNA/RNA Molecule: Synthetic oligonucleotide
  siRNAs to PCSK9
  modified_base (1)..(1): 2'-deoxy-2'-fluoro corresponding base
  modified_base (2)..(2): 2'-deoxy-2'-fluoro corresponding base
  modified_base (3)..(3): 2'-deoxy-2'-fluoro corresponding base
  modified_base (4)..(4): 2'-hydroxy corresponding base
  modified_base (5)..(5): 2'-hydroxy corresponding base
  modified_base (6)..(6): 2'-hydroxy corresponding base
  modified_base (7)..(7): 2'-deoxy-2'-fluoro corresponding base
  modified_base (8)..(8): 2'-deoxy-2'-fluoro corresponding base
  modified_base (9)..(9): 2'-deoxy-2'-fluoro corresponding base
  modified_base (10)..(10): 2'-hydroxy corresponding base
  modified_base (11)..(11): 2'-deoxy-2'-fluoro corresponding base
  modified_base (12)..(12): 2'-deoxy-2'-fluoro corresponding base
  modified_base (13)..(13): 2'-deoxy-2'-fluoro corresponding base
  modified_base (14)..(14): 2'-deoxy-2'-fluoro corresponding base
  modified_base (15)..(15): 2'-hydroxy corresponding base
  modified_base (16)..(16): 2'-deoxy-2'-fluoro corresponding base
  modified_base (17)..(17): 2'-deoxy-2'-fluoro corresponding base
  modified_base (18)..(18): 2'-deoxy-2'-fluoro corresponding base
  modified_base (19)..(19): 2'-deoxy-2'-fluoro corresponding base
  modified_base (20)..(20): deoxythymidine
  modified_base (21)..(21): 5'-thio thymidine
ucuagaccuguuuugcuuutt

SEQ ID NO: 1266 - DNA, 21 bp, Artificial Sequence
  Description of Artificial Sequence: Synthetic oligonucleotide
  Description of Combined DNA/RNA Molecule: Synthetic oligonucleotide
  siRNAs to PCSK9
  modified_base (1)..(1): 2'-hydroxy corresponding base
  modified_base (2)..(2): 2'-hydroxy corresponding base
  modified_base (3)..(3): 2'-hydroxy corresponding base
  modified_base (4)..(4): 2'-hydroxy corresponding base
  modified_base (5)..(5): 2'-deoxy-2'-fluoro corresponding base
  modified_base (6)..(6): 2'-hydroxy corresponding base
  modified_base (7)..(7): 2'-hydroxy corresponding base
  modified_base (8)..(8): 2'-hydroxy corresponding base
  modified_base (9)..(9): 2'-hydroxy corresponding base
  modified_base (10)..(10): 2'-deoxy-2'-fluoro corresponding base
  modified_base (11)..(11): 2'-hydroxy corresponding base
  modified_base (12)..(12): 2'-hydroxy corresponding base
  modified_base (13)..(13): 2'-hydroxy corresponding base
  modified_base (14)..(14): 2'-deoxy-2'-fluoro corresponding base
  modified_base (15)..(15): 2'-deoxy-2'-fluoro corresponding base
  modified_base (16)..(16): 2'-deoxy-2'-fluoro corresponding base
  modified_base (17)..(17): 2'-hydroxy corresponding base
  modified_base (18)..(18): 2'-hydroxy corresponding base
  modified_base (19)..(19): 2'-hydroxy corresponding base
  modified_base (20)..(20): deoxythymidine
  modified_base (21)..(21): 5'-thio thymidine
aaagcaaaacaggucuagatt

SEQ ID NO: 1267 - DNA, 21 bp, Artificial Sequence
  Description of Artificial Sequence: Synthetic oligonucleotide
  Description of Combined DNA/RNA Molecule: Synthetic oligonucleotide
  siRNAs to PCSK9
  modified_base (1)..(1): 2'-hydroxy corresponding base
  modified_base (2)..(2): 2'-O-methyl corresponding base
  modified_base (3)..(3): 2'-hydroxy corresponding base
  modified_base (4)..(4): 2'-O-methyl corresponding base
  modified_base (5)..(5): 2'-hydroxy corresponding base
  modified_base (6)..(6): 2'-O-methyl corresponding base
  modified_base (7)..(7): 2'-hydroxy corresponding base
  modified_base (8)..(8): 2'-O-methyl corresponding base
  modified_base (9)..(9): 2'-hydroxy corresponding base
  modified_base (10)..(10): 2'-O-methyl corresponding base
  modified_base (11)..(11): 2'-hydroxy corresponding base
  modified_base (12)..(12): 2'-O-methyl corresponding base
  modified_base (13)..(13): 2'-hydroxy corresponding base
  modified_base (14)..(14): 2'-O-methyl corresponding base
  modified_base (15)..(15): 2'-hydroxy corresponding base
  modified_base (16)..(16): 2'-O-methyl corresponding base
  modified_base (17)..(17): 2'-hydroxy corresponding base
  modified_base (18)..(18): 2'-O-methyl corresponding base
  modified_base (19)..(19): 2'-hydroxy corresponding base
  modified_base (20)..(20): deoxythymidine
  modified_base (21)..(21): 5'-thio thymidine
ucuagaccuguuuugcuuutt

SEQ ID NO: 1268 - DNA, 21 bp, Artificial Sequence
  Description of Artificial Sequence: Synthetic oligonucleotide
  Description of Combined DNA/RNA Molecule: Synthetic oligonucleotide
  siRNAs to PCSK9
  modified_base (1)..(1): 2'-O-methyl corresponding base
  modified_base (2)..(2): 2'-deoxy-2'-fluoro corresponding base
  modified_base (3)..(3): 2'-O-methyl corresponding base
  modified_base (4)..(4): 2'-deoxy-2'-fluoro corresponding base
  modified_base (5)..(5): 2'-O-methyl corresponding base
  modified_base (6)..(6): 2'-deoxy-2'-fluoro corresponding base
  modified_base (7)..(7): 2'-O-methyl corresponding base
  modified_base (8)..(8): 2'-deoxy-2'-fluoro corresponding base
  modified_base (9)..(9): 2'-O-methyl corresponding base
  modified_base (10)..(10): 2'-deoxy-2'-fluoro corresponding base
  modified_base (11)..(11): 2'-O-methyl corresponding base
  modified_base (12)..(12): 2'-deoxy-2'-fluoro corresponding base
  modified_base (13)..(13): 2'-O-methyl corresponding base
  modified_base (14)..(14): 2'-deoxy-2'-fluoro corresponding base
  modified_base (15)..(15): 2'-O-methyl corresponding base
  modified_base (16)..(16): 2'-deoxy-2'-fluoro corresponding base
  modified_base (17)..(17): 2'-O-methyl corresponding base
  modified_base (18)..(18): 2'-deoxy-2'-fluoro corresponding base
  modified_base (19)..(19): 2'-O-methyl corresponding base
  modified_base (20)..(20): deoxythymidine
  modified_base (21)..(21): 5'-thio thymidine
aaagcaaaacaggucuagatt

SEQ ID NO: 1269 - DNA, 21 bp, Artificial Sequence
  Description of Artificial Sequence: Synthetic oligonucleotide
  Description of Combined DNA/RNA Molecule: Synthetic oligonucleotide
  siRNAs to PCSK9
  modified_base (1)..(1): 2'-hydroxy corresponding base
  modified_base (2)..(2): 2'-O-methyl corresponding base
  modified_base (3)..(3): 2'-hydroxy corresponding base
  modified_base (4)..(4): 2'-O-methyl corresponding base
  modified_base (5)..(5): 2'-hydroxy corresponding base
  modified_base (6)..(6): 2'-O-methyl corresponding base
  modified_base (7)..(7): 2'-hydroxy corresponding base
  modified_base (8)..(8): 2'-O-methyl corresponding base
  modified_base (9)..(9): 2'-hydroxy corresponding base
  modified_base (10)..(10): 2'-O-methyl corresponding base
  modified_base (11)..(11): 2'-hydroxy corresponding base
  modified_base (12)..(12): 2'-O-methyl corresponding base
  modified_base (13)..(13): 2'-hydroxy corresponding base
  modified_base (14)..(14): 2'-O-methyl corresponding base
  modified_base (15)..(15): 2'-hydroxy corresponding base
  modified_base (16)..(16): 2'-O-methyl corresponding base
  modified_base (17)..(17): 2'-hydroxy corresponding base
  modified_base (18)..(18): 2'-O-methyl corresponding base
  modified_base (19)..(19): 2'-hydroxy corresponding base
  modified_base (20)..(20): deoxythymidine
  modified_base (21)..(21): 5'-thio thymidine
ucuagaccuguuuugcuuutt

SEQ ID NO: 1270 - DNA, 21 bp, Artificial Sequence
  Description of Artificial Sequence: Synthetic oligonucleotide
  Description of Combined DNA/RNA Molecule: Synthetic oligonucleotide
  siRNAs to PCSK9
  modified_base (1)..(1): 2'-hydroxy corresponding base
  modified_base (2)..(2): 2'-hydroxy corresponding base
  modified_base (3)..(3): 2'-hydroxy corresponding base
  modified_base (4)..(4): 2'-hydroxy corresponding base
  modified_base (5)..(5): 2'-deoxy-2'-fluoro corresponding base
  modified_base (6)..(6): 2'-hydroxy corresponding base
  modified_base (7)..(7): 2'-hydroxy corresponding base
  modified_base (8)..(8): 2'-hydroxy corresponding base
  modified_base (9)..(9): 2'-hydroxy corresponding base
  modified_base (10)..(10): 2'-deoxy-2'-fluoro corresponding base
  modified_base (11)..(11): 2'-hydroxy corresponding base
  modified_base (12)..(12): 2'-hydroxy corresponding base
  modified_base (13)..(13): 2'-hydroxy corresponding base
  modified_base (14)..(14): 2'-deoxy-2'-fluoro corresponding base
  modified_base (15)..(15): 2'-deoxy-2'-fluoro corresponding base
  modified_base (16)..(16): 2'-deoxy-2'-fluoro corresponding base
  modified_base (17)..(17): 2'-hydroxy corresponding base
  modified_base (18)..(18): 2'-hydroxy corresponding base
  modified_base (19)..(19): 2'-hydroxy corresponding base
  modified_base (20)..(20): deoxythymidine
  modified_base (21)..(21): 5'-thio thymidine
aaagcaaaacaggucuagatt

SEQ ID NO: 1271 - DNA, 21 bp, Artificial Sequence
  Description of Artificial Sequence: Synthetic oligonucleotide
  Description of Combined DNA/RNA Molecule: Synthetic oligonucleotide
  siRNAs to PCSK9
  modified_base (1)..(1): 2'-deoxy-2'-fluoro corresponding base
  modified_base (2)..(2): 2'-O-methyl corresponding base
  modified_base (3)..(3): 2'-deoxy-2'-fluoro corresponding base
  modified_base (4)..(4): 2'-O-methyl corresponding base
  modified_base (5)..(5): 2'-deoxy-2'-fluoro corresponding base
  modified_base (6)..(6): 2'-O-methyl corresponding base
  modified_base (7)..(7): 2'-deoxy-2'-fluoro corresponding base
  modified_base (8)..(8): 2'-O-methyl corresponding base
  modified_base (9)..(9): 2'-deoxy-2'-fluoro corresponding base
  modified_base (10)..(10): 2'-O-methyl corresponding base
  modified_base (11)..(11): 2'-deoxy-2'-fluoro corresponding base
  modified_base (12)..(12): 2'-O-methyl corresponding base
  modified_base (13)..(13): 2'-deoxy-2'-fluoro corresponding base
  modified_base (14)..(14): 2'-O-methyl corresponding base
  modified_base (15)..(15): 2'-deoxy-2'-fluoro corresponding base
  modified_base (16)..(16): 2'-O-methyl corresponding base
  modified_base (17)..(17): 2'-deoxy-2'-fluoro corresponding base
  modified_base (18)..(18): 2'-O-methyl corresponding base
  modified_base (19)..(19): 2'-deoxy-2'-fluoro corresponding base
  modified_base (20)..(20): deoxythymidine
  modified_base (21)..(21): 5'-thio thymidine
ucuagaccuguuuugcuuutt

SEQ ID NO: 1272 - DNA, 21 bp, Artificial Sequence
  Description of Artificial Sequence: Synthetic oligonucleotide
  Description of Combined DNA/RNA Molecule: Synthetic oligonucleotide
  siRNAs to PCSK9
  modified_base (1)..(1): 2'-hydroxy corresponding base
  modified_base (2)..(2): 2'-hydroxy corresponding base
  modified_base (3)..(3): 2'-hydroxy corresponding base
  modified_base (4)..(4): 2'-hydroxy corresponding base
  modified_base (5)..(5): 2'-hydroxy corresponding base
  modified_base (6)..(6): 2'-O-methyl corresponding base
  modified_base (7)..(7): 2'-O-methyl corresponding base
  modified_base (8)..(8): 2'-hydroxy corresponding base
  modified_base (9)..(9): 2'-hydroxy corresponding base
  modified_base (10)..(10): 2'-O-methyl corresponding base
  modified_base (11)..(11): 2'-O-methyl corresponding base
  modified_base (12)..(12): 2'-hydroxy corresponding base
  modified_base (13)..(13): 2'-hydroxy corresponding base
  modified_base (14)..(14): 2'-hydroxy corresponding base
  modified_base (15)..(15): 2'-hydroxy corresponding base
  modified_base (16)..(16): 2'-hydroxy corresponding base
  modified_base (17)..(17): 2'-O-methyl corresponding base
  modified_base (18)..(18): 2'-O-methyl corresponding base
  modified_base (19)..(19): 2'-O-methyl corresponding base
  modified_base (20)..(20): deoxythymidine
  modified_base (21)..(21): 5'-thio thymidine
aaagcaaaacaggucuagatt

SEQ ID NO: 1273 - DNA, 21 bp, Artificial Sequence
  Description of Artificial Sequence: Synthetic oligonucleotide
  Description of Combined DNA/RNA Molecule: Synthetic oligonucleotide
  siRNAs to PCSK9
  modified_base (1)..(1): 2'-deoxy-2'-fluoro corresponding base
  modified_base (2)..(2): 2'-deoxy-2'-fluoro corresponding base
  modified_base (3)..(3): 2'-deoxy-2'-fluoro corresponding base
  modified_base (4)..(4): 2'-hydroxy corresponding base
  modified_base (5)..(5): 2'-hydroxy corresponding base
  modified_base (6)..(6): 2'-hydroxy corresponding base
  modified_base (7)..(7): 2'-deoxy-2'-fluoro corresponding base
  modified_base (8)..(8): 2'-deoxy-2'-fluoro corresponding base
  modified_base (9)..(9): 2'-deoxy-2'-fluoro corresponding base
  modified_base (10)..(10): 2'-hydroxy corresponding base
  modified_base (11)..(11): 2'-deoxy-2'-fluoro corresponding base
  modified_base (12)..(12): 2'-deoxy-2'-fluoro corresponding base
  modified_base (13)..(13): 2'-deoxy-2'-fluoro corresponding base
  modified_base (14)..(14): 2'-deoxy-2'-fluoro corresponding base
  modified_base (15)..(15): 2'-hydroxy corresponding base
  modified_base (16)..(16): 2'-deoxy-2'-fluoro corresponding base
  modified_base (17)..(17): 2'-deoxy-2'-fluoro corresponding base
  modified_base (18)..(18): 2'-deoxy-2'-fluoro corresponding base
  modified_base (19)..(19): 2'-deoxy-2'-fluoro corresponding base
  modified_base (20)..(20): deoxythymidine
  modified_base (21)..(21): 5'-thio thymidine
ucuagaccuguuuugcuuutt

SEQ ID NO: 1274 - DNA, 21 bp, Artificial Sequence
  Description of Artificial Sequence: Synthetic oligonucleotide
  Description of Combined DNA/RNA Molecule: Synthetic oligonucleotide
  siRNAs to PCSK9
  modified_base (1)..(1): 2'-hydroxy corresponding base
  modified_base (2)..(2): 2'-hydroxy corresponding base
  modified_base (3)..(3): 2'-hydroxy corresponding base
  modified_base (4)..(4): 2'-hydroxy corresponding base
  modified_base (5)..(5): 2'-hydroxy corresponding base
  modified_base (6)..(6): 2'-O-methyl corresponding base
  modified_base (7)..(7): 2'-O-methyl corresponding base
  modified_base (8)..(8): 2'-hydroxy corresponding base
  modified_base (9)..(9): 2'-hydroxy corresponding base
  modified_base (10)..(10): 2'-O-methyl corresponding base
  modified_base (11)..(11): 2'-O-methyl corresponding base
  modified_base (12)..(12): 2'-hydroxy corresponding base
  modified_base (13)..(13): 2'-hydroxy corresponding base
  modified_base (14)..(14): 2'-hydroxy corresponding base
  modified_base (15)..(15): 2'-hydroxy corresponding base
  modified_base (16)..(16): 2'-hydroxy corresponding base
  modified_base (17)..(17): 2'-O-methyl corresponding base
  modified_base (18)..(18): 2'-O-methyl corresponding base
  modified_base (19)..(19): 2'-O-methyl corresponding base
  modified_base (20)..(20): deoxythymidine
  modified_base (21)..(21): 5'-thio thymidine
aaagcaaaacaggucuagatt

SEQ ID NO: 1275 - DNA, 21 bp, Artificial Sequence
  Description of Artificial Sequence: Synthetic oligonucleotide
  Description of Combined DNA/RNA Molecule: Synthetic oligonucleotide
  siRNAs to PCSK9
  modified_base (1)..(1): 2'-hydroxy corresponding base
  modified_base (2)..(2): 2'-O-methyl corresponding base
  modified_base (3)..(3): 2'-hydroxy corresponding base
  modified_base (4)..(4): 2'-O-methyl corresponding base
  modified_base (5)..(5): 2'-hydroxy corresponding base
  modified_base (6)..(6): 2'-O-methyl corresponding base
  modified_base (7)..(7): 2'-hydroxy corresponding base
  modified_base (8)..(8): 2'-O-methyl corresponding base
  modified_base (9)..(9): 2'-hydroxy corresponding base
  modified_base (10)..(10): 2'-O-methyl corresponding base
  modified_base (11)..(11): 2'-hydroxy corresponding base
  modified_base (12)..(12): 2'-O-methyl corresponding base
  modified_base (13)..(13): 2'-hydroxy corresponding base
  modified_base (14)..(14): 2'-O-methyl corresponding base
  modified_base (15)..(15): 2'-hydroxy corresponding base
  modified_base (16)..(16): 2'-O-methyl corresponding base
  modified_base (17)..(17): 2'-hydroxy corresponding base
  modified_base (18)..(18): 2'-O-methyl corresponding base
  modified_base (19)..(19): 2'-hydroxy corresponding base
  modified_base (20)..(20): deoxythymidine
  modified_base (21)..(21): 5'-thio thymidine
ucuagaccuguuuugcuuutt

SEQ ID NO: 1276 - DNA, 21 bp, Artificial Sequence
  Description of Artificial Sequence: Synthetic oligonucleotide
  Description of Combined DNA/RNA Molecule: Synthetic oligonucleotide
  siRNAs to PCSK9
  modified_base (1)..(1): 2'-hydroxy corresponding base
  modified_base (2)..(2): 2'-hydroxy corresponding base
  modified_base (3)..(3): 2'-hydroxy corresponding base
  modified_base (4)..(4): 2'-hydroxy corresponding base
  modified_base (5)..(5): 2'-hydroxy corresponding base
  modified_base (6)..(6): 2'-O-methyl corresponding base
  modified_base (7)..(7): 2'-O-methyl corresponding base
  modified_base (8)..(8): 2'-hydroxy corresponding base
  modified_base (9)..(9): 2'-hydroxy corresponding base
  modified_base (10)..(10): 2'-O-methyl corresponding base
  modified_base (11)..(11): 2'-O-methyl corresponding base
  modified_base (12)..(12): 2'-hydroxy corresponding base
  modified_base (13)..(13): 2'-hydroxy corresponding base
  modified_base (14)..(14): 2'-hydroxy corresponding base
  modified_base (15)..(15): 2'-hydroxy corresponding base
  modified_base (16)..(16): 2'-hydroxy corresponding base
  modified_base (17)..(17): 2'-O-methyl corresponding base
  modified_base (18)..(18): 2'-O-methyl corresponding base
  modified_base (19)..(19): 2'-O-methyl corresponding base
  modified_base (20)..(20): deoxythymidine
  modified_base (21)..(21): 5'-thio thymidine
aaagcaaaacaggucuagatt

SEQ ID NO: 1277 - DNA, 21 bp, Artificial Sequence
  Description of Artificial Sequence: Synthetic oligonucleotide
  Description of Combined DNA/RNA Molecule: Synthetic oligonucleotide
  siRNAs to PCSK9
  modified_base (1)..(1): 2'-deoxy-2'-fluoro corresponding base
  modified_base (2)..(2): 2'-O-methyl corresponding base
  modified_base (3)..(3): 2'-deoxy-2'-fluoro corresponding base
  modified_base (4)..(4): 2'-O-methyl corresponding base
  modified_base (5)..(5): 2'-deoxy-2'-fluoro corresponding base
  modified_base (6)..(6): 2'-O-methyl corresponding base
  modified_base (7)..(7): 2'-deoxy-2'-fluoro corresponding base
  modified_base (8)..(8): 2'-O-methyl corresponding base
  modified_base (9)..(9): 2'-deoxy-2'-fluoro corresponding base
  modified_base (10)..(10): 2'-O-methyl corresponding base
  modified_base (11)..(11): 2'-deoxy-2'-fluoro corresponding base
  modified_base (12)..(12): 2'-O-methyl corresponding base
  modified_base (13)..(13): 2'-deoxy-2'-fluoro corresponding base
  modified_base (14)..(14): 2'-O-methyl corresponding base
  modified_base (15)..(15): 2'-deoxy-2'-fluoro corresponding base
  modified_base (16)..(16): 2'-O-methyl corresponding base
  modified_base (17)..(17): 2'-deoxy-2'-fluoro corresponding base
  modified_base (18)..(18): 2'-O-methyl corresponding base
  modified_base (19)..(19): 2'-deoxy-2'-fluoro corresponding base
  modified_base (20)..(20): deoxythymidine
  modified_base (21)..(21): 5'-thio thymidine
ucauaggccuggaguuuautt

SEQ ID NO: 1278 - DNA, 21 bp, Artificial Sequence
  Description of Artificial Sequence: Synthetic oligonucleotide
  Description of Combined DNA/RNA Molecule: Synthetic oligonucleotide
  siRNAs to PCSK9
  modified_base (1)..(1): 2'-O-methyl corresponding base
  modified_base (2)..(2): 2'-deoxy-2'-fluoro corresponding base
  modified_base (3)..(3): 2'-O-methyl corresponding base
  modified_base (4)..(4): 2'-deoxy-2'-fluoro corresponding base
  modified_base (5)..(5): 2'-O-methyl corresponding base
  modified_base (6)..(6): 2'-deoxy-2'-fluoro corresponding base
  modified_base (7)..(7): 2'-O-methyl corresponding base
  modified_base (8)..(8): 2'-deoxy-2'-fluoro corresponding base
  modified_base (9)..(9): 2'-O-methyl corresponding base
  modified_base (10)..(10): 2'-deoxy-2'-fluoro corresponding base
  modified_base (11)..(11): 2'-O-methyl corresponding base
  modified_base (12)..(12): 2'-deoxy-2'-fluoro corresponding base
  modified_base (13)..(13): 2'-O-methyl corresponding base
  modified_base (14)..(14): 2'-deoxy-2'-fluoro corresponding base
  modified_base (15)..(15): 2'-O-methyl corresponding base
  modified_base (16)..(16): 2'-deoxy-2'-fluoro corresponding base
  modified_base (17)..(17): 2'-O-methyl corresponding base
  modified_base (18)..(18): 2'-deoxy-2'-fluoro corresponding base
  modified_base (19)..(19): 2'-O-methyl corresponding base
  modified_base (20)..(20): deoxythymidine
  modified_base (21)..(21): 5'-thio thymidine
auaaacuccaggccuaugatt

SEQ ID NO: 1279 - DNA, 21 bp, Artificial Sequence
  Description of Artificial Sequence: Synthetic oligonucleotide
  Description of Combined DNA/RNA Molecule: Synthetic oligonucleotide
  siRNAs to PCSK9
  modified_base (1)..(1): 2'-deoxy-2'-fluoro corresponding base
  modified_base (2)..(2): 2'-deoxy-2'-fluoro corresponding base
  modified_base (3)..(3): 2'-hydroxy corresponding base
  modified_base (4)..(4): 2'-deoxy-2'-fluoro corresponding base
  modified_base (5)..(5): 2'-hydroxy corresponding base
  modified_base (6)..(6): 2'-hydroxy corresponding base
  modified_base (7)..(7): 2'-hydroxy corresponding base
  modified_base (8)..(8): 2'-deoxy-2'-fluoro corresponding base
  modified_base (9)..(9): 2'-deoxy-2'-fluoro corresponding base
  modified_base (10)..(10): 2'-deoxy-2'-fluoro corresponding base
  modified_base (11)..(11): 2'-hydroxy corresponding base
  modified_base (12)..(12): 2'-hydroxy corresponding base
  modified_base (13)..(13): 2'-hydroxy corresponding base
  modified_base (14)..(14): 2'-hydroxy corresponding base
  modified_base (15)..(15): 2'-deoxy-2'-fluoro corresponding base
  modified_base (16)..(16): 2'-deoxy-2'-fluoro corresponding base
  modified_base (17)..(17): 2'-deoxy-2'-fluoro corresponding base
  modified_base (18)..(18): 2'-hydroxy corresponding base
  modified_base (19)..(19): 2'-deoxy-2'-fluoro corresponding base
  modified_base (20)..(20): deoxythymidine
  modified_base (21)..(21): 5'-thio thymidine
ucauaggccuggaguuuautt

SEQ ID NO: 1280 - DNA, 21 bp, Artificial Sequence
  Description of Artificial Sequence: Synthetic oligonucleotide
  Description of Combined DNA/RNA Molecule: Synthetic oligonucleotide
  siRNAs to PCSK9
  modified_base (1)..(1): 2'-hydroxy corresponding base
  modified_base (2)..(2): 2'-deoxy-2'-fluoro corresponding base
  modified_base (3)..(3): 2'-hydroxy corresponding base
  modified_base (4)..(4): 2'-hydroxy corresponding base
  modified_base (5)..(5): 2'-hydroxy corresponding base
  modified_base (6)..(6): 2'-deoxy-2'-fluoro corresponding base
  modified_base (7)..(7): 2'-deoxy-2'-fluoro corresponding base
  modified_base (8)..(8): 2'-deoxy-2'-fluoro corresponding base
  modified_base (9)..(9): 2'-deoxy-2'-fluoro corresponding base
  modified_base (10)..(10): 2'-hydroxy corresponding base
  modified_base (11)..(11): 2'-hydroxy corresponding base
  modified_base (12)..(12): 2'-hydroxy corresponding base
  modified_base (13)..(13): 2'-deoxy-2'-fluoro corresponding base
  modified_base (14)..(14): 2'-deoxy-2'-fluoro corresponding base
  modified_base (15)..(15): 2'-deoxy-2'-fluoro corresponding base
  modified_base (16)..(16): 2'-hydroxy corresponding base
  modified_base (17)..(17): 2'-deoxy-2'-fluoro corresponding base
  modified_base (18)..(18): 2'-hydroxy corresponding base
  modified_base (19)..(19): 2'-hydroxy corresponding base
  modified_base (20)..(20): deoxythymidine
  modified_base (21)..(21): 5'-thio thymidine
auaaacuccaggccuaugatt

SEQ ID NO: 1281 - DNA, 21 bp, Artificial Sequence
  Description of Artificial Sequence: Synthetic oligonucleotide
  Description of Combined DNA/RNA Molecule: Synthetic oligonucleotide
  siRNAs to PCSK9
  modified_base (1)..(1): 2'-hydroxy corresponding base
  modified_base (2)..(2): 2'-O-methyl corresponding base
  modified_base (3)..(3): 2'-hydroxy corresponding base
  modified_base (4)..(4): 2'-O-methyl corresponding base
  modified_base (5)..(5): 2'-hydroxy corresponding base
  modified_base (6)..(6): 2'-O-methyl corresponding base
  modified_base (7)..(7): 2'-hydroxy corresponding base
  modified_base (8)..(8): 2'-O-methyl corresponding base
  modified_base (9)..(9): 2'-hydroxy corresponding base
  modified_base (10)..(10): 2'-O-methyl corresponding base
  modified_base (11)..(11): 2'-hydroxy corresponding base
  modified_base (12)..(12): 2'-O-methyl corresponding base
  modified_base (13)..(13): 2'-hydroxy corresponding base
  modified_base (14)..(14): 2'-O-methyl corresponding base
  modified_base (15)..(15): 2'-hydroxy corresponding base
  modified_base (16)..(16): 2'-O-methyl corresponding base
  modified_base (17)..(17): 2'-hydroxy corresponding base
  modified_base (18)..(18): 2'-O-methyl corresponding base
  modified_base (19)..(19): 2'-hydroxy corresponding base
  modified_base (20)..(20): deoxythymidine
  modified_base (21)..(21): 5'-thio thymidine
ucauaggccuggaguuuautt

SEQ ID NO: 1282 - DNA, 21 bp, Artificial Sequence
  Description of Artificial Sequence: Synthetic oligonucleotide
  Description of Combined DNA/RNA Molecule: Synthetic oligonucleotide
  siRNAs to PCSK9
  modified_base (1)..(1): 2'-O-methyl corresponding base
  modified_base (2)..(2): 2'-deoxy-2'-fluoro corresponding base
  modified_base (3)..(3): 2'-O-methyl corresponding base
  modified_base (4)..(4): 2'-deoxy-2'-fluoro corresponding base
  modified_base (5)..(5): 2'-O-methyl corresponding base
  modified_base (6)..(6): 2'-deoxy-2'-fluoro corresponding base
  modified_base (7)..(7): 2'-O-methyl corresponding base
  modified_base (8)..(8): 2'-deoxy-2'-fluoro corresponding base
  modified_base (9)..(9): 2'-O-methyl corresponding base
  modified_base (10)..(10): 2'-deoxy-2'-fluoro corresponding base
  modified_base (11)..(11): 2'-O-methyl corresponding base
  modified_base (12)..(12): 2'-deoxy-2'-fluoro corresponding base
  modified_base (13)..(13): 2'-O-methyl corresponding base
  modified_base (14)..(14): 2'-deoxy-2'-fluoro corresponding base
  modified_base (15)..(15): 2'-O-methyl corresponding base
  modified_base (16)..(16): 2'-deoxy-2'-fluoro corresponding base
  modified_base (17)..(17): 2'-O-methyl corresponding base
  modified_base (18)..(18): 2'-deoxy-2'-fluoro corresponding base
  modified_base (19)..(19): 2'-O-methyl corresponding base
  modified_base (20)..(20): deoxythymidine
  modified_base (21)..(21): 5'-thio thymidine
auaaacuccaggccuaugatt

SEQ ID NO: 1283 - DNA, 21 bp, Artificial Sequence
  Description of Artificial Sequence: Synthetic oligonucleotide
  Description of Combined DNA/RNA Molecule: Synthetic oligonucleotide
  siRNAs to PCSK9
  modified_base (1)..(1): 2'-hydroxy corresponding base
  modified_base (2)..(2): 2'-O-methyl corresponding base
  modified_base (3)..(3): 2'-hydroxy corresponding base
  modified_base (4)..(4): 2'-O-methyl corresponding base
  modified_base (5)..(5): 2'-hydroxy corresponding base
  modified_base (6)..(6): 2'-O-methyl corresponding base
  modified_base (7)..(7): 2'-hydroxy corresponding base
  modified_base (8)..(8): 2'-O-methyl corresponding base
  modified_base (9)..(9): 2'-hydroxy corresponding base
  modified_base (10)..(10): 2'-O-methyl corresponding base
  modified_base (11)..(11): 2'-hydroxy corresponding base
  modified_base (12)..(12): 2'-O-methyl corresponding base
  modified_base (13)..(13): 2'-hydroxy corresponding base
  modified_base (14)..(14): 2'-O-methyl corresponding base
  modified_base (15)..(15): 2'-hydroxy corresponding base
  modified_base (16)..(16): 2'-O-methyl corresponding base
  modified_base (17)..(17): 2'-hydroxy corresponding base
  modified_base (18)..(18): 2'-O-methyl corresponding base
  modified_base (19)..(19): 2'-hydroxy corresponding base
  modified_base (20)..(20): deoxythymidine
  modified_base (21)..(21): 5'-thio thymidine
ucauaggccuggaguuuautt

SEQ ID NO: 1284 - DNA, 21 bp, Artificial Sequence
  Description of Artificial Sequence: Synthetic oligonucleotide
  Description of Combined DNA/RNA Molecule: Synthetic oligonucleotide
  siRNAs to PCSK9
  modified_base (1)..(1): 2'-hydroxy corresponding base
  modified_base (2)..(2): 2'-deoxy-2'-fluoro corresponding base
  modified_base (3)..(3): 2'-hydroxy corresponding base
  modified_base (4)..(4): 2'-hydroxy corresponding base
  modified_base (5)..(5): 2'-hydroxy corresponding base
  modified_base (6)..(6): 2'-deoxy-2'-fluoro corresponding base
  modified_base (7)..(7): 2'-deoxy-2'-fluoro corresponding base
  modified_base (8)..(8): 2'-deoxy-2'-fluoro corresponding base
  modified_base (9)..(9): 2'-deoxy-2'-fluoro corresponding base
  modified_base (10)..(10): 2'-hydroxy corresponding base
  modified_base (11)..(11): 2'-hydroxy corresponding base
  modified_base (12)..(12): 2'-hydroxy corresponding base
  modified_base (13)..(13): 2'-deoxy-2'-fluoro corresponding base
  modified_base (14)..(14): 2'-deoxy-2'-fluoro corresponding base
  modified_base (15)..(15): 2'-deoxy-2'-fluoro corresponding base
  modified_base (16)..(16): 2'-hydroxy corresponding base
  modified_base (17)..(17): 2'-deoxy-2'-fluoro corresponding base
  modified_base (18)..(18): 2'-hydroxy corresponding base
  modified_base (19)..(19): 2'-hydroxy corresponding base
  modified_base (20)..(20): deoxythymidine
  modified_base (21)..(21): 5'-thio thymidine
auaaacuccaggccuaugatt

SEQ ID NO: 1285 - DNA, 21 bp, Artificial Sequence
  Description of Artificial Sequence: Synthetic oligonucleotide
  Description of Combined DNA/RNA Molecule: Synthetic oligonucleotide
  siRNAs to PCSK9
  modified_base (1)..(1): 2'-deoxy-2'-fluoro corresponding base
  modified_base (2)..(2): 2'-O-methyl corresponding base
  modified_base (3)..(3): 2'-deoxy-2'-fluoro corresponding base
  modified_base (4)..(4): 2'-O-methyl corresponding base
  modified_base (5)..(5): 2'-deoxy-2'-fluoro corresponding base
  modified_base (6)..(6): 2'-O-methyl corresponding base
  modified_base (7)..(7): 2'-deoxy-2'-fluoro corresponding base
  modified_base (8)..(8): 2'-O-methyl corresponding base
  modified_base (9)..(9): 2'-deoxy-2'-fluoro corresponding base
  modified_base (10)..(10): 2'-O-methyl corresponding base
  modified_base (11)..(11): 2'-deoxy-2'-fluoro corresponding base
  modified_base (12)..(12): 2'-O-methyl corresponding base
  modified_base (13)..(13): 2'-deoxy-2'-fluoro corresponding base
  modified_base (14)..(14): 2'-O-methyl corresponding base
  modified_base (15)..(15): 2'-deoxy-2'-fluoro corresponding base
  modified_base (16)..(16): 2'-O-methyl corresponding base
  modified_base (17)..(17): 2'-deoxy-2'-fluoro corresponding base
  modified_base (18)..(18): 2'-O-methyl corresponding base
  modified_base (19)..(19): 2'-deoxy-2'-fluoro corresponding base
  modified_base (20)..(20): deoxythymidine
  modified_base (21)..(21): 5'-thio thymidine
ucauaggccuggaguuuautt

SEQ ID NO: 1286 - DNA, 21 bp, Artificial Sequence
  Description of Artificial Sequence: Synthetic oligonucleotide
  Description of Combined DNA/RNA Molecule: Synthetic oligonucleotide
  siRNAs to PCSK9
  modified_base (1)..(1): 2'-hydroxy corresponding base
  modified_base (2)..(2): 2'-hydroxy corresponding base
  modified_base (3)..(3): 2'-hydroxy corresponding base
  modified_base (4)..(4): 2'-hydroxy corresponding base
  modified_base (5)..(5): 2'-hydroxy corresponding base
  modified_base (6)..(6): 2'-O-methyl corresponding base
  modified_base (7)..(7): 2'-O-methyl corresponding base
  modified_base (8)..(8): 2'-hydroxy corresponding base
  modified_base (9)..(9): 2'-hydroxy corresponding base
  modified_base (10)..(10): 2'-O-methyl corresponding base
  modified_base (11)..(11): 2'-O-methyl corresponding base
  modified_base (12)..(12): 2'-hydroxy corresponding base
  modified_base (13)..(13): 2'-hydroxy corresponding base
  modified_base (14)..(14): 2'-hydroxy corresponding base
  modified_base (15)..(15): 2'-hydroxy corresponding base
  modified_base (16)..(16): 2'-hydroxy corresponding base
  modified_base (17)..(17): 2'-O-methyl corresponding base
  modified_base (18)..(18): 2'-O-methyl corresponding base
  modified_base (19)..(19): 2'-O-methyl corresponding base
  modified_base (20)..(20): deoxythymidine
  modified_base (21)..(21): 5'-thio thymidine
auaaacuccaggccuaugatt

SEQ ID NO: 1287 - DNA, 21 bp, Artificial Sequence
  Description of Artificial Sequence: Synthetic oligonucleotide
  Description of Combined DNA/RNA Molecule: Synthetic oligonucleotide
  siRNAs to PCSK9
  modified_base (1)..(1): 2'-deoxy-2'-fluoro corresponding base
  modified_base (2)..(2): 2'-deoxy-2'-fluoro corresponding base
  modified_base (3)..(3): 2'-hydroxy corresponding base
  modified_base (4)..(4): 2'-deoxy-2'-fluoro corresponding base
  modified_base (5)..(5): 2'-hydroxy corresponding base
  modified_base (6)..(6): 2'-hydroxy corresponding base
  modified_base (7)..(7): 2'-hydroxy corresponding base
  modified_base (8)..(8): 2'-deoxy-2'-fluoro corresponding base
  modified_base (9)..(9): 2'-deoxy-2'-fluoro corresponding base
  modified_base (10)..(10): 2'-deoxy-2'-fluoro corresponding base
  modified_base (11)..(11): 2'-hydroxy corresponding base
  modified_base (12)..(12): 2'-hydroxy corresponding base
  modified_base (13)..(13): 2'-hydroxy corresponding base
  modified_base (14)..(14): 2'-hydroxy corresponding base
  modified_base (15)..(15): 2'-deoxy-2'-fluoro corresponding base
  modified_base (16)..(16): 2'-deoxy-2'-fluoro corresponding base
  modified_base (17)..(17): 2'-deoxy-2'-fluoro corresponding base
  modified_base (18)..(18): 2'-hydroxy corresponding base
  modified_base (19)..(19): 2'-deoxy-2'-fluoro corresponding base
  modified_base (20)..(20): deoxythymidine
  modified_base (21)..(21): 5'-thio thymidine
ucauaggccuggaguuuautt

SEQ ID NO: 1288 - DNA, 21 bp, Artificial Sequence
  Description of Artificial Sequence: Synthetic oligonucleotide
  Description of Combined DNA/RNA Molecule: Synthetic oligonucleotide
  siRNAs to PCSK9
  modified_base (1)..(1): 2'-hydroxy corresponding base
  modified_base (2)..(2): 2'-hydroxy corresponding base
  modified_base (3)..(3): 2'-hydroxy corresponding base
  modified_base (4)..(4): 2'-hydroxy corresponding base
  modified_base (5)..(5): 2'-hydroxy corresponding base
  modified_base (6)..(6): 2'-O-methyl corresponding base
  modified_base (7)..(7): 2'-O-methyl corresponding base
  modified_base (8)..(8): 2'-hydroxy corresponding base
  modified_base (9)..(9): 2'-hydroxy corresponding base
  modified_base (10)..(10): 2'-O-methyl corresponding base
  modified_base (11)..(11): 2'-O-methyl corresponding base
  modified_base (12)..(12): 2'-hydroxy corresponding base
  modified_base (13)..(13): 2'-hydroxy corresponding base
  modified_base (14)..(14): 2'-hydroxy corresponding base
  modified_base (15)..(15): 2'-hydroxy corresponding base
  modified_base (16)..(16): 2'-hydroxy corresponding base
  modified_base (17)..(17): 2'-O-methyl corresponding base
  modified_base (18)..(18): 2'-O-methyl corresponding base
  modified_base (19)..(19): 2'-O-methyl corresponding base
  modified_base (20)..(20): deoxythymidine
  modified_base (21)..(21): 5'-thio thymidine
auaaacuccaggccuaugatt

SEQ ID NO: 1289 - DNA, 21 bp, Artificial Sequence
  Description of Artificial Sequence: Synthetic oligonucleotide
  Description of Combined DNA/RNA Molecule: Synthetic oligonucleotide
  siRNAs to PCSK9
  modified_base (1)..(1): 2'-hydroxy corresponding base
  modified_base (2)..(2): 2'-O-methyl corresponding base
  modified_base (3)..(3): 2'-hydroxy corresponding base
  modified_base (4)..(4): 2'-O-methyl corresponding base
  modified_base (5)..(5): 2'-hydroxy corresponding base
  modified_base (6)..(6): 2'-O-methyl corresponding base
  modified_base (7)..(7): 2'-hydroxy corresponding base
  modified_base (8)..(8): 2'-O-methyl corresponding base
  modified_base (9)..(9): 2'-hydroxy corresponding base
  modified_base (10)..(10): 2'-O-methyl corresponding base
  modified_base (11)..(11): 2'-hydroxy corresponding base
  modified_base (12)..(12): 2'-O-methyl corresponding base
  modified_base (13)..(13): 2'-hydroxy corresponding base
  modified_base (14)..(14): 2'-O-methyl corresponding base
  modified_base (15)..(15): 2'-hydroxy corresponding base
  modified_base (16)..(16): 2'-O-methyl corresponding base
  modified_base (17)..(17): 2'-hydroxy corresponding base
  modified_base (18)..(18): 2'-O-methyl corresponding base
  modified_base (19)..(19): 2'-hydroxy corresponding base
  modified_base (20)..(20): deoxythymidine
  modified_base (21)..(21): 5'-thio thymidine
ucauaggccuggaguuuautt

SEQ ID NO: 1290 - DNA, 21 bp, Artificial Sequence
  Description of Artificial Sequence: Synthetic oligonucleotide
  Description of Combined DNA/RNA Molecule: Synthetic oligonucleotide
  siRNAs to PCSK9
  modified_base (1)..(1): 2'-hydroxy corresponding base
  modified_base (2)..(2): 2'-hydroxy corresponding base
  modified_base (3)..(3): 2'-hydroxy corresponding base
  modified_base (4)..(4): 2'-hydroxy corresponding base
  modified_base (5)..(5): 2'-hydroxy corresponding base
  modified_base (6)..(6): 2'-O-methyl corresponding base
  modified_base (7)..(7): 2'-O-methyl corresponding base
  modified_base (8)..(8): 2'-hydroxy corresponding base
  modified_base (9)..(9): 2'-hydroxy corresponding base
  modified_base (10)..(10): 2'-O-methyl corresponding base
  modified_base (11)..(11): 2'-O-methyl corresponding base
  modified_base (12)..(12): 2'-hydroxy corresponding base
  modified_base (13)..(13): 2'-hydroxy corresponding base
  modified_base (14)..(14): 2'-hydroxy corresponding base
  modified_base (15)..(15): 2'-hydroxy corresponding base
  modified_base (16)..(16): 2'-hydroxy corresponding base
  modified_base (17)..(17): 2'-O-methyl corresponding base
  modified_base (18)..(18): 2'-O-methyl corresponding base
  modified_base (19)..(19): 2'-O-methyl corresponding base
  modified_base (20)..(20): deoxythymidine
  modified_base (21)..(21): 5'-thio thymidine
auaaacuccaggccuaugatt

SEQ ID NO: 1291 - DNA, 21 bp, Artificial Sequence
  Description of Artificial Sequence: Synthetic oligonucleotide
  Description of Combined DNA/RNA Molecule: Synthetic oligonucleotide
  siRNAs to PCSK9
  modified_base (1)..(1): 2'-hydroxy corresponding base
  modified_base (2)..(2): 2'-hydroxy corresponding base
  modified_base (3)..(3): 2'-hydroxy corresponding base
  modified_base (4)..(4): 2'-hydroxy corresponding base
  modified_base (5)..(5): 2'-hydroxy corresponding base
  modified_base (6)..(6): 2'-hydroxy corresponding base
  modified_base (7)..(7): 2'-hydroxy corresponding base
  modified_base (8)..(8): 2'-hydroxy corresponding base
  modified_base (9)..(9): 2'-hydroxy corresponding base
  modified_base (10)..(10): 2'-hydroxy corresponding base
  modified_base (11)..(11): 2'-hydroxy corresponding base
  modified_base (12)..(12): 2'-hydroxy corresponding base
  modified_base (13)..(13): 2'-hydroxy corresponding base
  modified_base (14)..(14): 2'-hydroxy corresponding base
  modified_base (15)..(15): 2'-hydroxy corresponding base
  modified_base (16)..(16): 2'-hydroxy corresponding base
  modified_base (17)..(17): 2'-hydroxy corresponding base
  modified_base (18)..(18): 2'-hydroxy corresponding base
  modified_base (19)..(19): 2'-hydroxy corresponding base
  modified_base (20)..(20): deoxythymidine
  modified_base (21)..(21): 5'-thio thymidine
ugaagauauuuauucugggtt

SEQ ID NO: 1292 - DNA, 21 bp, Artificial Sequence
  Description of Artificial Sequence: Synthetic oligonucleotide
  Description of Combined DNA/RNA Molecule: Synthetic oligonucleotide
  siRNAs to PCSK9
  modified_base (1)..(1): 2'-hydroxy corresponding base
  modified_base (2)..(2): 2'-hydroxy corresponding base
  modified_base (3)..(3): 2'-hydroxy corresponding base
  modified_base (4)..(4): 2'-hydroxy corresponding base
  modified_base (5)..(5): 2'-hydroxy corresponding base
  modified_base (6)..(6): 2'-hydroxy corresponding base
  modified_base (7)..(7): 2'-hydroxy corresponding base
  modified_base (8)..(8): 2'-hydroxy corresponding base
  modified_base (9)..(9): 2'-hydroxy corresponding base
  modified_base (10)..(10): 2'-hydroxy corresponding base
  modified_base (11)..(11): 2'-hydroxy corresponding base
  modified_base (12)..(12): 2'-hydroxy corresponding base
  modified_base (13)..(13): 2'-hydroxy corresponding base
  modified_base (14)..(14): 2'-hydroxy corresponding base
  modified_base (15)..(15): 2'-hydroxy corresponding base
  modified_base (16)..(16): 2'-hydroxy corresponding base
  modified_base (17)..(17): 2'-hydroxy corresponding base
  modified_base (18)..(18): 2'-hydroxy corresponding base
  modified_base (19)..(19): 2'-hydroxy corresponding base
  modified_base (20)..(20): deoxythymidine
  modified_base (21)..(21): 5'-thio thymidine
cccagaauaaauaucuucatt

SEQ ID NO: 1293 - DNA, 21 bp, Artificial Sequence
  Description of Artificial Sequence: Synthetic oligonucleotide
  Description of Combined DNA/RNA Molecule: Synthetic oligonucleotide
  siRNAs to PCSK9
  modified_base (1)..(1): 2'-O-methyl corresponding base
  modified_base (2)..(2): 2'-hydroxy corresponding base
  modified_base (3)..(3): 2'-hydroxy corresponding base
  modified_base (4)..(4): 2'-hydroxy corresponding base
  modified_base (5)..(5): 2'-hydroxy corresponding base
  modified_base (6)..(6): 2'-hydroxy corresponding base
  modified_base (7)..(7): 2'-O-methyl corresponding base
  modified_base (8)..(8): 2'-hydroxy corresponding base
  modified_base (9)..(9): 2'-O-methyl corresponding base
  modified_base (10)..(10): 2'-O-methyl corresponding base
  modified_base (11)..(11): 2'-O-methyl corresponding base
  modified_base (12)..(12): 2'-hydroxy corresponding base
  modified_base (13)..(13): 2'-O-methyl corresponding base
  modified_base (14)..(14): 2'-O-methyl corresponding base
  modified_base (15)..(15): 2'-O-methyl corresponding base
  modified_base (16)..(16): 2'-O-methyl corresponding base
  modified_base (17)..(17): 2'-hydroxy corresponding base
  modified_base (18)..(18): 2'-hydroxy corresponding base
  modified_base (19)..(19): 2'-hydroxy corresponding base
  modified_base (20)..(20): deoxythymidine
  modified_base (21)..(21): 5'-thio thymidine
ugaagauauuuauucugggtt

SEQ ID NO: 1294 - DNA, 21 bp, Artificial Sequence
  Description of Artificial Sequence: Synthetic oligonucleotide
  Description of Combined DNA/RNA Molecule: Synthetic oligonucleotide
  siRNAs to PCSK9
  modified_base (1)..(1): 2'-hydroxy corresponding base
  modified_base (2)..(2): 2'-hydroxy corresponding base
  modified_base (3)..(3): 2'-O-methyl corresponding base
  modified_base (4)..(4): 2'-hydroxy corresponding base
  modified_base (5)..(5): 2'-hydroxy corresponding base
  modified_base (6)..(6): 2'-hydroxy corresponding base
  modified_base (7)..(7): 2'-hydroxy corresponding base
  modified_base (8)..(8): 2'-O-methyl corresponding base
  modified_base (9)..(9): 2'-hydroxy corresponding base
  modified_base (10)..(10): 2'-hydroxy corresponding base
  modified_base (11)..(11): 2'-hydroxy corresponding base
  modified_base (12)..(12): 2'-O-methyl corresponding base
  modified_base (13)..(13): 2'-hydroxy corresponding base
  modified_base (14)..(14): 2'-hydroxy corresponding base
  modified_base (15)..(15): 2'-hydroxy corresponding base
  modified_base (16)..(16): 2'-hydroxy corresponding base
  modified_base (17)..(17): 2'-hydroxy corresponding base
  modified_base (18)..(18): 2'-O-methyl corresponding base
  modified_base (19)..(19): 2'-hydroxy corresponding base
  modified_base (20)..(20): deoxythymidine
  modified_base (21)..(21): 5'-thio thymidine
cccagaauaaauaucuucatt

SEQ ID NO: 1295 - DNA, 21 bp, Artificial Sequence
  Description of Artificial Sequence: Synthetic oligonucleotide
  Description of Combined DNA/RNA Molecule: Synthetic oligonucleotide
  siRNAs to PCSK9
  modified_base (1)..(1): 2'-hydroxy corresponding base
  modified_base (2)..(2): 2'-hydroxy corresponding base
  modified_base (3)..(3): 2'-hydroxy corresponding base
  modified_base (4)..(4): 2'-hydroxy corresponding base
  modified_base (5)..(5): 2'-hydroxy corresponding base
  modified_base (6)..(6): 2'-hydroxy corresponding base
  modified_base (7)..(7): 2'-hydroxy corresponding base
  modified_base (8)..(8): 2'-hydroxy corresponding base
  modified_base (9)..(9): 2'-hydroxy corresponding base
  modified_base (10)..(10): 2'-hydroxy corresponding base
  modified_base (11)..(11): 2'-hydroxy corresponding base
  modified_base (12)..(12): 2'-hydroxy corresponding base
  modified_base (13)..(13): 2'-hydroxy corresponding base
  modified_base (14)..(14): 2'-hydroxy corresponding base
  modified_base (15)..(15): 2'-hydroxy corresponding base
  modified_base (16)..(16): 2'-hydroxy corresponding base
  modified_base (17)..(17): 2'-hydroxy corresponding base
  modified_base (18)..(18): 2'-hydroxy corresponding base
  modified_base (19)..(19): 2'-hydroxy corresponding base
  modified_base (20)..(20): deoxythymidine
  modified_base (21)..(21): 5'-thio thymidine
ucuggguuuuguagcauuutt

SEQ ID NO: 1296 - DNA, 21 bp, Artificial Sequence
  Description of Artificial Sequence: Synthetic oligonucleotide
  Description of Combined DNA/RNA Molecule: Synthetic oligonucleotide
  siRNAs to PCSK9
  modified_base (1)..(1): 2'-hydroxy corresponding base
  modified_base (2)..(2): 2'-hydroxy corresponding base
  modified_base (3)..(3): 2'-hydroxy corresponding base
  modified_base (4)..(4): 2'-hydroxy corresponding base
  modified_base (5)..(5): 2'-hydroxy corresponding base
  modified_base (6)..(6): 2'-hydroxy corresponding base
  modified_base (7)..(7): 2'-hydroxy corresponding base
  modified_base (8)..(8): 2'-hydroxy corresponding base
  modified_base (9)..(9): 2'-hydroxy corresponding base
  modified_base (10)..(10): 2'-hydroxy corresponding base
  modified_base (11)..(11): 2'-hydroxy corresponding base
  modified_base (12)..(12): 2'-hydroxy corresponding base
  modified_base (13)..(13): 2'-hydroxy corresponding base
  modified_base (14)..(14): 2'-hydroxy corresponding base
  modified_base (15)..(15): 2'-hydroxy corresponding base
  modified_base (16)..(16): 2'-hydroxy corresponding base
  modified_base (17)..(17): 2'-hydroxy corresponding base
  modified_base (18)..(18): 2'-hydroxy corresponding base
  modified_base (19)..(19): 2'-hydroxy corresponding base
  modified_base (20)..(20): deoxythymidine
  modified_base (21)..(21): 5'-thio thymidine
aaaugcuacaaaacccagatt

SEQ ID NO: 1297 - DNA, 21 bp, Artificial Sequence
  Description of Artificial Sequence: Synthetic oligonucleotide
  Description of Combined DNA/RNA Molecule: Synthetic oligonucleotide
  siRNAs to PCSK9
  modified_base (1)..(1): 2'-O-methyl corresponding base
  modified_base (2)..(2): 2'-O-methyl corresponding base
  modified_base (3)..(3): 2'-O-methyl corresponding base
  modified_base (4)..(4): 2'-hydroxy corresponding base
  modified_base (5)..(5): 2'-hydroxy corresponding base
  modified_base (6)..(6): 2'-hydroxy corresponding base
  modified_base (7)..(7): 2'-O-methyl corresponding base
  modified_base (8)..(8): 2'-O-methyl corresponding base
  modified_base (9)..(9): 2'-O-methyl corresponding base
  modified_base (10)..(10): 2'-O-methyl corresponding base
  modified_base (11)..(11): 2'-hydroxy corresponding base
  modified_base (12)..(12): 2'-O-methyl corresponding base
  modified_base (13)..(13): 2'-hydroxy corresponding base
  modified_base (14)..(14): 2'-hydroxy corresponding base
  modified_base (15)..(15): 2'-O-methyl corresponding base
  modified_base (16)..(16): 2'-hydroxy corresponding base
  modified_base (17)..(17): 2'-O-methyl corresponding base
  modified_base (18)..(18): 2'-O-methyl corresponding base
  modified_base (19)..(19): 2'-O-methyl corresponding base
  modified_base (20)..(20): deoxythymidine
  modified_base (21)..(21): 5'-thio thymidine
ucuggguuuuguagcauuutt

SEQ ID NO: 1298 - DNA, 21 bp, Artificial Sequence
  Description of Artificial Sequence: Synthetic oligonucleotide
  Description of Combined DNA/RNA Molecule: Synthetic oligonucleotide
  siRNAs to PCSK9
  modified_base (1)..(1): 2'-hydroxy corresponding base
  modified_base (2)..(2): 2'-hydroxy corresponding base
  modified_base (3)..(3): 2'-hydroxy corresponding base
  modified_base (4)..(4): 2'-hydroxy corresponding base
  modified_base (5)..(5): 2'-hydroxy corresponding base
  modified_base (6)..(6): 2'-hydroxy corresponding base
  modified_base (7)..(7): 2'-O-methyl corresponding base
  modified_base (8)..(8): 2'-hydroxy corresponding base
  modified_base (9)..(9): 2'-O-methyl corresponding base
  modified_base (10)..(10): 2'-hydroxy corresponding base
  modified_base (11)..(11): 2'-hydroxy corresponding base
  modified_base (12)..(12): 2'-hydroxy corresponding base
  modified_base (13)..(13): 2'-hydroxy corresponding base
  modified_base (14)..(14): 2'-hydroxy corresponding base
  modified_base (15)..(15): 2'-hydroxy corresponding base
  modified_base (16)..(16): 2'-O-methyl corresponding base
  modified_base (17)..(17): 2'-hydroxy corresponding base
  modified_base (18)..(18): 2'-hydroxy corresponding base
  modified_base (19)..(19): 2'-hydroxy corresponding base
  modified_base (20)..(20): deoxythymidine
  modified_base (21)..(21): 5'-thio thymidine
aaaugcuacaaaacccagatt

SEQ ID NO: 1299 - DNA, 21 bp, Artificial Sequence
  Description of Artificial Sequence: Synthetic oligonucleotide
  Description of Combined DNA/RNA Molecule: Synthetic oligonucleotide
  siRNAs to PCSK9
  modified_base (1)..(1): 2'-hydroxy corresponding base
  modified_base (2)..(2): 2'-hydroxy corresponding base
  modified_base (3)..(3): 2'-hydroxy corresponding base
  modified_base (4)..(4): 2'-hydroxy corresponding base
  modified_base (5)..(5): 2'-hydroxy corresponding base
  modified_base (6)..(6): 2'-hydroxy corresponding base
  modified_base (7)..(7): 2'-hydroxy corresponding base
  modified_base (8)..(8): 2'-hydroxy corresponding base
  modified_base (9)..(9): 2'-hydroxy corresponding base
  modified_base (10)..(10): 2'-hydroxy corresponding base
  modified_base (11)..(11): 2'-hydroxy corresponding base
  modified_base (12)..(12): 2'-hydroxy corresponding base
  modified_base (13)..(13): 2'-hydroxy corresponding base
  modified_base (14)..(14): 2'-hydroxy corresponding base
  modified_base (15)..(15): 2'-hydroxy corresponding base
  modified_base (16)..(16): 2'-hydroxy corresponding base
  modified_base (17)..(17): 2'-hydroxy corresponding base
  modified_base (18)..(18): 2'-hydroxy corresponding base
  modified_base (19)..(19): 2'-hydroxy corresponding base
  modified_base (20)..(20): deoxythymidine
  modified_base (21)..(21): deoxythymidine
auaaaaacaaacaaacguutt

SEQ ID NO: 1300 - DNA, 21 bp, Artificial Sequence
  Description of Artificial Sequence: Synthetic oligonucleotide
  Description of Combined DNA/RNA Molecule: Synthetic oligonucleotide
  siRNAs to PCSK9
  modified_base (1)..(1): 2'-hydroxy corresponding base
  modified_base (2)..(2): 2'-hydroxy corresponding base
  modified_base (3)..(3): 2'-hydroxy corresponding base
  modified_base (4)..(4): 2'-hydroxy corresponding base
  modified_base (5)..(5): 2'-hydroxy corresponding base
  modified_base (6)..(6): 2'-hydroxy corresponding base
  modified_base (7)..(7): 2'-hydroxy corresponding base
  modified_base (8)..(8): 2'-hydroxy corresponding base
  modified_base (9)..(9): 2'-hydroxy corresponding base
  modified_base (10)..(10): 2'-hydroxy corresponding base
  modified_base (11)..(11): 2'-hydroxy corresponding base
  modified_base (12)..(12): 2'-hydroxy corresponding base
  modified_base (13)..(13): 2'-hydroxy corresponding base
  modified_base (14)..(14): 2'-hydroxy corresponding base
  modified_base (15)..(15): 2'-hydroxy corresponding base
  modified_base (16)..(16): 2'-hydroxy corresponding base
  modified_base (17)..(17): 2'-hydroxy corresponding base
  modified_base (18)..(18): 2'-hydroxy corresponding base
  modified_base (19)..(19): 2'-hydroxy corresponding base
  modified_base (20)..(20): deoxythymidine
  modified_base (21)..(21): deoxythymidine
aacguuuguuuguuuuuautt

SEQ ID NO: 1301 - DNA, 21 bp, Artificial Sequence
  Description of Artificial Sequence: Synthetic oligonucleotide
  Description of Combined DNA/RNA Molecule: Synthetic oligonucleotide
  siRNAs to PCSK9
  modified_base (1)..(1): 2'-hydroxy corresponding base
  modified_base (2)..(2): 2'-hydroxy corresponding base
  modified_base (3)..(3): 2'-hydroxy corresponding base
  modified_base (4)..(4): 2'-hydroxy corresponding base
  modified_base (5)..(5): 2'-hydroxy corresponding base
  modified_base (6)..(6): 2'-hydroxy corresponding base
  modified_base (7)..(7): 2'-hydroxy corresponding base
  modified_base (8)..(8): 2'-hydroxy corresponding base
  modified_base (9)..(9): 2'-hydroxy corresponding base
  modified_base (10)..(10): 2'-hydroxy corresponding base
  modified_base (11)..(11): 2'-hydroxy corresponding base
  modified_base (12)..(12): 2'-hydroxy corresponding base
  modified_base (13)..(13): 2'-hydroxy corresponding base
  modified_base (14)..(14): 2'-hydroxy corresponding base
  modified_base (15)..(15): 2'-hydroxy corresponding base
  modified_base (16)..(16): 2'-hydroxy corresponding base
  modified_base (17)..(17): 2'-hydroxy corresponding base
  modified_base (18)..(18): 2'-hydroxy corresponding base
  modified_base (19)..(19): 2'-hydroxy corresponding base
  modified_base (20)..(20): deoxythymidine
  modified_base (21)..(21): deoxythymidine
aaacaaacaaacguugucctt

SEQ ID NO: 1302 - DNA, 21 bp, Artificial Sequence
  Description of Artificial Sequence: Synthetic oligonucleotide
  Description of Combined DNA/RNA Molecule: Synthetic oligonucleotide
  siRNAs to PCSK9
  modified_base (1)..(1): 2'-hydroxy corresponding base
  modified_base (2)..(2): 2'-hydroxy corresponding base
  modified_base (3)..(3): 2'-hydroxy corresponding base
  modified_base (4)..(4): 2'-hydroxy corresponding base
  modified_base (5)..(5): 2'-hydroxy corresponding base
  modified_base (6)..(6): 2'-hydroxy corresponding base
  modified_base (7)..(7): 2'-hydroxy corresponding base
  modified_base (8)..(8): 2'-hydroxy corresponding base
  modified_base (9)..(9): 2'-hydroxy corresponding base
  modified_base (10)..(10): 2'-hydroxy corresponding base
  modified_base (11)..(11): 2'-hydroxy corresponding base
  modified_base (12)..(12): 2'-hydroxy corresponding base
  modified_base (13)..(13): 2'-hydroxy corresponding base
  modified_base (14)..(14): 2'-hydroxy corresponding base
  modified_base (15)..(15): 2'-hydroxy corresponding base
  modified_base (16)..(16): 2'-hydroxy corresponding base
  modified_base (17)..(17): 2'-hydroxy corresponding base
  modified_base (18)..(18): 2'-hydroxy corresponding base
  modified_base (19)..(19): 2'-hydroxy corresponding base
  modified_base (20)..(20): deoxythymidine
  modified_base (21)..(21): deoxythymidine
ggacaacguuuguuuguuutt

SEQ ID NO: 1303 - DNA, 21 bp, Artificial Sequence
  Description of Artificial Sequence: Synthetic oligonucleotide
  Description of Combined DNA/RNA Molecule: Synthetic oligonucleotide
  siRNAs to PCSK9
  modified_base (1)..(1): 2'-hydroxy corresponding base
  modified_base (2)..(2): 2'-hydroxy corresponding base
  modified_base (3)..(3): 2'-hydroxy corresponding base
  modified_base (4)..(4): 2'-hydroxy corresponding base
  modified_base (5)..(5): 2'-hydroxy corresponding base
  modified_base (6)..(6): 2'-hydroxy corresponding base
  modified_base (7)..(7): 2'-hydroxy corresponding base
  modified_base (8)..(8): 2'-hydroxy corresponding base
  modified_base (9)..(9): 2'-hydroxy corresponding base
  modified_base (10)..(10): 2'-hydroxy corresponding base
  modified_base (11)..(11): 2'-hydroxy corresponding base
  modified_base (12)..(12): 2'-hydroxy corresponding base
  modified_base (13)..(13): 2'-hydroxy corresponding base
  modified_base (14)..(14): 2'-hydroxy corresponding base
  modified_base (15)..(15): 2'-hydroxy corresponding base
  modified_base (16)..(16): 2'-hydroxy corresponding base
  modified_base (17)..(17): 2'-hydroxy corresponding base
  modified_base (18)..(18): 2'-hydroxy corresponding base
  modified_base (19)..(19): 2'-hydroxy corresponding base
  modified_base (20)..(20): deoxythymidine
  modified_base (21)..(21): deoxythymidine
aacaaacaaacguuguccutt

SEQ ID NO: 1304 - DNA, 21 bp, Artificial Sequence
  Description of Artificial Sequence: Synthetic oligonucleotide
  Description of Combined DNA/RNA Molecule: Synthetic oligonucleotide
  siRNAs to PCSK9
  modified_base (1)..(1): 2'-hydroxy corresponding base
  modified_base (2)..(2): 2'-hydroxy corresponding base
  modified_base (3)..(3): 2'-hydroxy corresponding base
  modified_base (4)..(4): 2'-hydroxy corresponding base
  modified_base (5)..(5): 2'-hydroxy corresponding base
  modified_base (6)..(6): 2'-hydroxy corresponding base
  modified_base (7)..(7): 2'-hydroxy corresponding base
  modified_base (8)..(8): 2'-hydroxy corresponding base
  modified_base (9)..(9): 2'-hydroxy corresponding base
  modified_base (10)..(10): 2'-hydroxy corresponding base
  modified_base (11)..(11): 2'-hydroxy corresponding base
  modified_base (12)..(12): 2'-hydroxy corresponding base
  modified_base (13)..(13): 2'-hydroxy corresponding base
  modified_base (14)..(14): 2'-hydroxy corresponding base
  modified_base (15)..(15): 2'-hydroxy corresponding base
  modified_base (16)..(16): 2'-hydroxy corresponding base
  modified_base (17)..(17): 2'-hydroxy corresponding base
  modified_base (18)..(18): 2'-hydroxy corresponding base
  modified_base (19)..(19): 2'-hydroxy corresponding base
  modified_base (20)..(20): deoxythymidine
  modified_base (21)..(21): deoxythymidine
aggacaacguuuguuuguutt

SEQ ID NO: 1305 - DNA, 21 bp, Artificial Sequence
  Description of Artificial Sequence: Synthetic oligonucleotide
  Description of Combined DNA/RNA Molecule: Synthetic oligonucleotide
  siRNAs to PCSK9
  modified_base (1)..(1): 2'-hydroxy corresponding base
  modified_base (2)..(2): 2'-O-methyl corresponding base
  modified_base (3)..(3): 2'-O-methyl corresponding base
  modified_base (4)..(4): 2'-O-methyl corresponding base
  modified_base (5)..(5): 2'-hydroxy corresponding base
  modified_base (6)..(6): 2'-hydroxy corresponding base
  modified_base (7)..(7): 2'-hydroxy corresponding base
  modified_base (8)..(8): 2'-hydroxy corresponding base
  modified_base (9)..(9): 2'-O-methyl corresponding base
  modified_base (10)..(10): 2'-O-methyl corresponding base
  modified_base (11)..(11): 2'-O-methyl corresponding base
  modified_base (12)..(12): 2'-hydroxy corresponding base
  modified_base (13)..(13): 2'-O-methyl corresponding base
  modified_base (14)..(14): 2'-O-methyl corresponding base
  modified_base (15)..(15): 2'-O-methyl corresponding base
  modified_base (16)..(16): 2'-hydroxy corresponding base
  modified_base (17)..(17): 2'-hydroxy corresponding base
  modified_base (18)..(18): 2'-hydroxy corresponding base
  modified_base (19)..(19): 2'-hydroxy corresponding base
  modified_base (20)..(20): deoxythymidine
  modified_base (21)..(21): 5'-thio thymidine
gccuggaguuuauucggaatt

SEQ ID NO: 1306 - DNA, 21 bp, Artificial Sequence
  Description of Artificial Sequence: Synthetic oligonucleotide
  Description of Combined DNA/RNA Molecule: Synthetic oligonucleotide
  siRNAs to PCSK9
  modified_base (1)..(1): 2'-hydroxy corresponding base
  modified_base (2)..(2): 2'-hydroxy corresponding base
  modified_base (3)..(3): 2'-hydroxy corresponding base
  modified_base (4)..(4): 2'-hydroxy corresponding base
  modified_base (5)..(5): 2'-hydroxy corresponding base
  modified_base (6)..(6): 2'-hydroxy corresponding base
  modified_base (7)..(7): 2'-hydroxy corresponding base
  modified_base (8)..(8): 2'-O-methyl corresponding base
  modified_base (9)..(9): 2'-hydroxy corresponding base
  modified_base (10)..(10): 2'-hydroxy corresponding base
  modified_base (11)..(11): 2'-hydroxy corresponding base
  modified_base (12)..(12): 2'-hydroxy corresponding base
  modified_base (13)..(13): 2'-hydroxy corresponding base
  modified_base (14)..(14): 2'-hydroxy corresponding base
  modified_base (15)..(15): 2'-O-methyl corresponding base
  modified_base (16)..(16): 2'-hydroxy corresponding base
  modified_base (17)..(17): 2'-hydroxy corresponding base
  modified_base (18)..(18): 2'-hydroxy corresponding base
  modified_base (19)..(19): 2'-hydroxy corresponding base
  modified_base (20)..(20): deoxythymidine
  modified_base (21)..(21): 5'-thio thymidine
uuccgaauaaacuccaggctt

SEQ ID NO: 1307 - DNA, 21 bp, Artificial Sequence
  Description of Artificial Sequence: Synthetic oligonucleotide
  Description of Combined DNA/RNA Molecule: Synthetic oligonucleotide
  siRNAs to PCSK9
  modified_base (1)..(1): 2'-hydroxy corresponding base
  modified_base (2)..(2): 2'-O-methyl corresponding base
  modified_base (3)..(3): 2'-O-methyl corresponding base
  modified_base (4)..(4): 2'-O-methyl corresponding base
  modified_base (5)..(5): 2'-hydroxy corresponding base
  modified_base (6)..(6): 2'-hydroxy corresponding base
  modified_base (7)..(7): 2'-hydroxy corresponding base
  modified_base (8)..(8): 2'-hydroxy corresponding base
  modified_base (9)..(9): 2'-O-methyl corresponding base
  modified_base (10)..(10): 2'-O-methyl corresponding base
  modified_base (11)..(11): 2'-O-methyl corresponding base
  modified_base (12)..(12): 2'-hydroxy corresponding base
  modified_base (13)..(13): 2'-O-methyl corresponding base
  modified_base (14)..(14): 2'-O-methyl corresponding base
  modified_base (15)..(15): 2'-O-methyl corresponding base
  modified_base (16)..(16): 2'-hydroxy corresponding base
  modified_base (17)..(17): 2'-hydroxy corresponding base
  modified_base (18)..(18): 2'-hydroxy corresponding base
  modified_base (19)..(19): 2'-hydroxy corresponding base
  modified_base (20)..(20): deoxythymidine
  modified_base (21)..(21): 5'-thio thymidine
gccuggaguuuauucggaatt

SEQ ID NO: 1308 - DNA, 21 bp, Artificial Sequence
  Description of Artificial Sequence: Synthetic oligonucleotide
  Description of Combined DNA/RNA Molecule: Synthetic oligonucleotide
  siRNAs to PCSK9
  modified_base (1)..(1): 2'-O-methyl corresponding base
  modified_base (2)..(2): 2'-hydroxy corresponding base
  modified_base (3)..(3): 2'-O-methyl corresponding base
  modified_base (4)..(4): 2'-hydroxy corresponding base
  modified_base (5)..(5): 2'-hydroxy corresponding base
  modified_base (6)..(6): 2'-hydroxy corresponding base
  modified_base (7)..(7): 2'-hydroxy corresponding base
  modified_base (8)..(8): 2'-O-methyl corresponding base
  modified_base (9)..(9): 2'-hydroxy corresponding base
  modified_base (10)..(10): 2'-hydroxy corresponding base
  modified_base (11)..(11): 2'-hydroxy corresponding base
  modified_base (12)..(12): 2'-hydroxy corresponding base
  modified_base (13)..(13): 2'-hydroxy corresponding base
  modified_base (14)..(14): 2'-O-methyl corresponding base
  modified_base (15)..(15): 2'-O-methyl corresponding base
  modified_base (16)..(16): 2'-hydroxy corresponding base
  modified_base (17)..(17): 2'-hydroxy corresponding base
  modified_base (18)..(18): 2'-hydroxy corresponding base
  modified_base (19)..(19): 2'-hydroxy corresponding base
  modified_base (20)..(20): deoxythymidine
  modified_base (21)..(21): 5'-thio thymidine
uuccgaauaaacuccaggctt

SEQ ID NO: 1309 - DNA, 21 bp, Artificial Sequence
  Description of Artificial Sequence: Synthetic oligonucleotide
  Description of Combined DNA/RNA Molecule: Synthetic oligonucleotide
  siRNAs to PCSK9
  modified_base (1)..(1): 2'-hydroxy corresponding base
  modified_base (2)..(2): 2'-O-methyl corresponding base
  modified_base (3)..(3): 2'-O-methyl corresponding base
  modified_base (4)..(4): 2'-O-methyl corresponding base
  modified_base (5)..(5): 2'-hydroxy corresponding base
  modified_base (6)..(6): 2'-hydroxy corresponding base
  modified_base (7)..(7): 2'-hydroxy corresponding base
  modified_base (8)..(8): 2'-hydroxy corresponding base
  modified_base (9)..(9): 2'-O-methyl corresponding base
  modified_base (10)..(10): 2'-O-methyl corresponding base
  modified_base (11)..(11): 2'-O-methyl corresponding base
  modified_base (12)..(12): 2'-hydroxy corresponding base
  modified_base (13)..(13): 2'-O-methyl corresponding base
  modified_base (14)..(14): 2'-O-methyl corresponding base
  modified_base (15)..(15): 2'-O-methyl corresponding base
  modified_base (16)..(16): 2'-hydroxy corresponding base
  modified_base (17)..(17): 2'-hydroxy corresponding base
  modified_base (18)..(18): 2'-hydroxy corresponding base
  modified_base (19)..(19): 2'-hydroxy corresponding base
  modified_base (20)..(20): deoxythymidine
  modified_base (21)..(21): 5'-thio thymidine
gccuggaguuuauucggaatt

SEQ ID NO: 1310 - DNA, 21 bp, Artificial Sequence
  Description of Artificial Sequence: Synthetic oligonucleotide
  Description of Combined DNA/RNA Molecule: Synthetic oligonucleotide
  siRNAs to PCSK9
  modified_base (1)..(1): 2'-hydroxy corresponding base
  modified_base (2)..(2): 2'-hydroxy corresponding base
  modified_base (3)..(3): 2'-hydroxy corresponding base
  modified_base (4)..(4): 2'-hydroxy corresponding base
  modified_base (5)..(5): 2'-hydroxy corresponding base
  modified_base (6)..(6): 2'-hydroxy corresponding base
  modified_base (7)..(7): 2'-hydroxy corresponding base
  modified_base (8)..(8): 2'-hydroxy corresponding base
  modified_base (9)..(9): 2'-hydroxy corresponding base
  modified_base (10)..(10): 2'-hydroxy corresponding base
  modified_base (11)..(11): 2'-hydroxy corresponding base
  modified_base (12)..(12): 2'-hydroxy corresponding base
  modified_base (13)..(13): 2'-hydroxy corresponding base
  modified_base (14)..(14): 2'-hydroxy corresponding base
  modified_base (15)..(15): 2'-hydroxy corresponding base
  modified_base (16)..(16): 2'-hydroxy corresponding base
  modified_base (17)..(17): 2'-hydroxy corresponding base
  modified_base (18)..(18): 2'-hydroxy corresponding base
  modified_base (19)..(19): 2'-hydroxy corresponding base
  modified_base (20)..(20): deoxythymidine
  modified_base (21)..(21): 5'-thio thymidine
uuccgaauaaacuccaggctt

SEQ ID NO: 1311 - DNA, 21 bp, Artificial Sequence
  Description of Artificial Sequence: Synthetic oligonucleotide
  Description of Combined DNA/RNA Molecule: Synthetic oligonucleotide
  siRNAs to PCSK9
  modified_base (1)..(1): 2'-hydroxy corresponding base
  modified_base (2)..(2): 2'-O-methyl corresponding base
  modified_base (3)..(3): 2'-O-methyl corresponding base
  modified_base (4)..(4): 2'-O-methyl corresponding base
  modified_base (5)..(5): 2'-hydroxy corresponding base
  modified_base (6)..(6): 2'-hydroxy corresponding base
  modified_base (7)..(7): 2'-hydroxy corresponding base
  modified_base (8)..(8): 2'-hydroxy corresponding base
  modified_base (9)..(9): 2'-O-methyl corresponding base
  modified_base (10)..(10): 2'-O-methyl corresponding base
  modified_base (11)..(11): 2'-O-methyl corresponding base
  modified_base (12)..(12): 2'-hydroxy corresponding base
  modified_base (13)..(13): 2'-O-methyl corresponding base
  modified_base (14)..(14): 2'-O-methyl corresponding base
  modified_base (15)..(15): 2'-O-methyl corresponding base
  modified_base (16)..(16): 2'-hydroxy corresponding base
  modified_base (17)..(17): 2'-hydroxy corresponding base
  modified_base (18)..(18): 2'-hydroxy corresponding base
  modified_base (19)..(19): 2'-hydroxy corresponding base
  modified_base (20)..(20): deoxythymidine
  modified_base (21)..(21): 5'-thio thymidine
gccuggaguuuauucggaatt

SEQ ID NO: 1312 - DNA, 21 bp, Artificial Sequence
  Description of Artificial Sequence: Synthetic oligonucleotide
  Description of Combined DNA/RNA Molecule: Synthetic oligonucleotide
  siRNAs to PCSK9
  modified_base (1)..(1): 2'-O-methyl corresponding base
  modified_base (2)..(2): 2'-hydroxy corresponding base
  modified_base (3)..(3): 2'-hydroxy corresponding base
  modified_base (4)..(4): 2'-hydroxy corresponding base
  modified_base (5)..(5): 2'-hydroxy corresponding base
  modified_base (6)..(6): 2'-hydroxy corresponding base
  modified_base (7)..(7): 2'-hydroxy corresponding base
  modified_base (8)..(8): 2'-hydroxy corresponding base
  modified_base (9)..(9): 2'-hydroxy corresponding base
  modified_base (10)..(10): 2'-hydroxy corresponding base
  modified_base (11)..(11): 2'-hydroxy corresponding base
  modified_base (12)..(12): 2'-hydroxy corresponding base
  modified_base (13)..(13): 2'-hydroxy corresponding base
  modified_base (14)..(14): 2'-hydroxy corresponding base
  modified_base (15)..(15): 2'-hydroxy corresponding base
  modified_base (16)..(16): 2'-hydroxy corresponding base
  modified_base (17)..(17): 2'-hydroxy corresponding base
  modified_base (18)..(18): 2'-hydroxy corresponding base
  modified_base (19)..(19): 2'-hydroxy corresponding base
  modified_base (20)..(20): deoxythymidine
  modified_base (21)..(21): 5'-thio thymidine
uuccgaauaaacuccaggctt

SEQ ID NO: 1313 - DNA, 21 bp, Artificial Sequence
  Description of Artificial Sequence: Synthetic oligonucleotide
  Description of Combined DNA/RNA Molecule: Synthetic oligonucleotide
  siRNAs to PCSK9
  modified_base (1)..(1): 2'-hydroxy corresponding base
  modified_base (2)..(2): 2'-O-methyl corresponding base
  modified_base (3)..(3): 2'-O-methyl corresponding base
  modified_base (4)..(4): 2'-O-methyl corresponding base
  modified_base (5)..(5): 2'-hydroxy corresponding base
  modified_base (6)..(6): 2'-hydroxy corresponding base
  modified_base (7)..(7): 2'-hydroxy corresponding base
  modified_base (8)..(8): 2'-hydroxy corresponding base
  modified_base (9)..(9): 2'-O-methyl corresponding base
  modified_base (10)..(10): 2'-O-methyl corresponding base
  modified_base (11)..(11): 2'-O-methyl corresponding base
  modified_base (12)..(12): 2'-hydroxy corresponding base
  modified_base (13)..(13): 2'-O-methyl corresponding base
  modified_base (14)..(14): 2'-O-methyl corresponding base
  modified_base (15)..(15): 2'-O-methyl corresponding base
  modified_base (16)..(16): 2'-hydroxy corresponding base
  modified_base (17)..(17): 2'-hydroxy corresponding base
  modified_base (18)..(18): 2'-hydroxy corresponding base
  modified_base (19)..(19): 2'-hydroxy corresponding base
  modified_base (20)..(20): deoxythymidine
  modified_base (21)..(21): 5'-thio thymidine
gccuggaguuuauucggaatt

SEQ ID NO: 1314 - DNA, 21 bp, Artificial Sequence
  Description of Artificial Sequence: Synthetic oligonucleotide
  Description of Combined DNA/RNA Molecule: Synthetic oligonucleotide
  siRNAs to PCSK9
  modified_base (1)..(1): 2'-hydroxy corresponding base
  modified_base (2)..(2): 2'-O-methyl corresponding base
  modified_base (3)..(3): 2'-hydroxy corresponding base
  modified_base (4)..(4): 2'-hydroxy corresponding base
  modified_base (5)..(5): 2'-hydroxy corresponding base
  modified_base (6)..(6): 2'-hydroxy corresponding base
  modified_base (7)..(7): 2'-hydroxy corresponding base
  modified_base (8)..(8): 2'-hydroxy corresponding base
  modified_base (9)..(9): 2'-hydroxy corresponding base
  modified_base (10)..(10): 2'-hydroxy corresponding base
  modified_base (11)..(11): 2'-hydroxy corresponding base
  modified_base (12)..(12): 2'-hydroxy corresponding base
  modified_base (13)..(13): 2'-hydroxy corresponding base
  modified_base (14)..(14): 2'-hydroxy corresponding base
  modified_base (15)..(15): 2'-hydroxy corresponding base
  modified_base (16)..(16): 2'-hydroxy corresponding base
  modified_base (17)..(17): 2'-hydroxy corresponding base
  modified_base (18)..(18): 2'-hydroxy corresponding base
  modified_base (19)..(19): 2'-hydroxy corresponding base
  modified_base (20)..(20): deoxythymidine
  modified_base (21)..(21): 5'-thio thymidine
uuccgaauaaacuccaggctt

SEQ ID NO: 1315 - DNA, 21 bp, Artificial Sequence
  Description of Artificial Sequence: Synthetic oligonucleotide
  Description of Combined DNA/RNA Molecule: Synthetic oligonucleotide
  siRNAs to PCSK9
  modified_base (1)..(1): 2'-hydroxy corresponding base
  modified_base (2)..(2): 2'-O-methyl corresponding base
  modified_base (3)..(3): 2'-O-methyl corresponding base
  modified_base (4)..(4): 2'-O-methyl corresponding base
  modified_base (5)..(5): 2'-hydroxy corresponding base
  modified_base (6)..(6): 2'-hydroxy corresponding base
  modified_base (7)..(7): 2'-hydroxy corresponding base
  modified_base (8)..(8): 2'-hydroxy corresponding base
  modified_base (9)..(9): 2'-O-methyl corresponding base
  modified_base (10)..(10): 2'-O-methyl corresponding base
  modified_base (11)..(11): 2'-O-methyl corresponding base
  modified_base (12)..(12): 2'-hydroxy corresponding base
  modified_base (13)..(13): 2'-O-methyl corresponding base
  modified_base (14)..(14): 2'-O-methyl corresponding base
  modified_base (15)..(15): 2'-O-methyl corresponding base
  modified_base (16)..(16): 2'-hydroxy corresponding base
  modified_base (17)..(17): 2'-hydroxy corresponding base
  modified_base (18)..(18): 2'-hydroxy corresponding base
  modified_base (19)..(19): 2'-hydroxy corresponding base
  modified_base (20)..(20): deoxythymidine
  modified_base (21)..(21): 5'-thio thymidine
gccuggaguuuauucggaatt

SEQ ID NO: 1316 - DNA, 21 bp, Artificial Sequence
  Description of Artificial Sequence: Synthetic oligonucleotide
  Description of Combined DNA/RNA Molecule: Synthetic oligonucleotide
  siRNAs to PCSK9
  modified_base (1)..(1): 2'-hydroxy corresponding base
  modified_base (2)..(2): 2'-hydroxy corresponding base
  modified_base (3)..(3): 2'-O-methyl corresponding base
  modified_base (4)..(4): 2'-hydroxy corresponding base
  modified_base (5)..(5): 2'-hydroxy corresponding base
  modified_base (6)..(6): 2'-hydroxy corresponding base
  modified_base (7)..(7): 2'-hydroxy corresponding base
  modified_base (8)..(8): 2'-hydroxy corresponding base
  modified_base (9)..(9): 2'-hydroxy corresponding base
  modified_base (10)..(10): 2'-hydroxy corresponding base
  modified_base (11)..(11): 2'-hydroxy corresponding base
  modified_base (12)..(12): 2'-hydroxy corresponding base
  modified_base (13)..(13): 2'-hydroxy corresponding base
  modified_base (14)..(14): 2'-hydroxy corresponding base
  modified_base (15)..(15): 2'-hydroxy corresponding base
  modified_base (16)..(16): 2'-hydroxy corresponding base
  modified_base (17)..(17): 2'-hydroxy corresponding base
  modified_base (18)..(18): 2'-hydroxy corresponding base
  modified_base (19)..(19): 2'-hydroxy corresponding base
  modified_base (20)..(20): deoxythymidine
  modified_base (21)..(21): 5'-thio thymidine
uuccgaauaaacuccaggctt

SEQ ID NO: 1317 - DNA, 21 bp, Artificial Sequence
  Description of Artificial Sequence: Synthetic oligonucleotide
  Description of Combined DNA/RNA Molecule: Synthetic oligonucleotide
  siRNAs to PCSK9
  modified_base (1)..(1): 2'-hydroxy corresponding base
  modified_base (2)..(2): 2'-O-methyl corresponding base
  modified_base (3)..(3): 2'-O-methyl corresponding base
  modified_base (4)..(4): 2'-O-methyl corresponding base
  modified_base (5)..(5): 2'-hydroxy corresponding base
  modified_base (6)..(6): 2'-hydroxy corresponding base
  modified_base (7)..(7): 2'-hydroxy corresponding base
  modified_base (8)..(8): 2'-hydroxy corresponding base
  modified_base (9)..(9): 2'-O-methyl corresponding base
  modified_base (10)..(10): 2'-O-methyl corresponding base
  modified_base (11)..(11): 2'-O-methyl corresponding base
  modified_base (12)..(12): 2'-hydroxy corresponding base
  modified_base (13)..(13): 2'-O-methyl corresponding base
  modified_base (14)..(14): 2'-O-methyl corresponding base
  modified_base (15)..(15): 2'-O-methyl corresponding base
  modified_base (16)..(16): 2'-hydroxy corresponding base
  modified_base (17)..(17): 2'-hydroxy corresponding base
  modified_base (18)..(18): 2'-hydroxy corresponding base
  modified_base (19)..(19): 2'-hydroxy corresponding base
  modified_base (20)..(20): deoxythymidine
  modified_base (21)..(21): 5'-thio thymidine
gccuggaguuuauucggaatt

SEQ ID NO: 1318 - DNA, 21 bp, Artificial Sequence
  Description of Artificial Sequence: Synthetic oligonucleotide
  Description of Combined DNA/RNA Molecule: Synthetic oligonucleotide
  siRNAs to PCSK9
  modified_base (1)..(1): 2'-hydroxy corresponding base
  modified_base (2)..(2): 2'-hydroxy corresponding base
  modified_base (3)..(3): 2'-hydroxy corresponding base
  modified_base (4)..(4): 2'-O-methyl corresponding base
  modified_base (5)..(5): 2'-hydroxy corresponding base
  modified_base (6)..(6): 2'-hydroxy corresponding base
  modified_base (7)..(7): 2'-hydroxy corresponding base
  modified_base (8)..(8): 2'-hydroxy corresponding base
  modified_base (9)..(9): 2'-hydroxy corresponding base
  modified_base (10)..(10): 2'-hydroxy corresponding base
  modified_base (11)..(11): 2'-hydroxy corresponding base
  modified_base (12)..(12): 2'-hydroxy corresponding base
  modified_base (13)..(13): 2'-hydroxy corresponding base
  modified_base (14)..(14): 2'-hydroxy corresponding base
  modified_base (15)..(15): 2'-hydroxy corresponding base
  modified_base (16)..(16): 2'-hydroxy corresponding base
  modified_base (17)..(17): 2'-hydroxy corresponding base
  modified_base (18)..(18): 2'-hydroxy corresponding base
  modified_base (19)..(19): 2'-hydroxy corresponding base
  modified_base (20)..(20): deoxythymidine
  modified_base (21)..(21): 5'-thio thymidine
uuccgaauaaacuccaggctt

SEQ ID NO: 1319 - DNA, 21 bp, Artificial Sequence
  Description of Artificial Sequence: Synthetic oligonucleotide
  Description of Combined DNA/RNA Molecule: Synthetic oligonucleotide
  siRNAs to PCSK9
  modified_base (1)..(1): 2'-hydroxy corresponding base
  modified_base (2)..(2): 2'-hydroxy corresponding base
  modified_base (3)..(3): 2'-hydroxy corresponding base
  modified_base (4)..(4): 2'-hydroxy corresponding base
  modified_base (5)..(5): 2'-hydroxy corresponding base
  modified_base (6)..(6): 2'-hydroxy corresponding base
  modified_base (7)..(7): 2'-hydroxy corresponding base
  modified_base (8)..(8): 2'-hydroxy corresponding base
  modified_base (9)..(9): 2'-hydroxy corresponding base
  modified_base (10)..(10): 2'-hydroxy corresponding base
  modified_base (11)..(11): 2'-hydroxy corresponding base
  modified_base (12)..(12): 2'-hydroxy corresponding base
  modified_base (13)..(13): 2'-hydroxy corresponding base
  modified_base (14)..(14): 2'-hydroxy corresponding base
  modified_base (15)..(15): 2'-hydroxy corresponding base
  modified_base (16)..(16): 2'-hydroxy corresponding base
  modified_base (17)..(17): 2'-hydroxy corresponding base
  modified_base (18)..(18): 2'-hydroxy corresponding base
  modified_base (19)..(19): 2'-hydroxy corresponding base
  modified_base (20)..(20): deoxythymidine
  modified_base (21)..(21): 5'-thio thymidine
gccuggaguuuauucggaatt

SEQ ID NO: 1320 - DNA, 21 bp, Artificial Sequence
  Description of Artificial Sequence: Synthetic oligonucleotide
  Description of Combined DNA/RNA Molecule: Synthetic oligonucleotide
  siRNAs to PCSK9
  modified_base (1)..(1): 2'-O-methyl corresponding base
  modified_base (2)..(2): 2'-hydroxy corresponding base
  modified_base (3)..(3): 2'-hydroxy corresponding base
  modified_base (4)..(4): 2'-hydroxy corresponding base
  modified_base (5)..(5): 2'-hydroxy corresponding base
  modified_base (6)..(6): 2'-hydroxy corresponding base
  modified_base (7)..(7): 2'-hydroxy corresponding base
  modified_base (8)..(8): 2'-hydroxy corresponding base
  modified_base (9)..(9): 2'-hydroxy corresponding base
  modified_base (10)..(10): 2'-hydroxy corresponding base
  modified_base (11)..(11): 2'-hydroxy corresponding base
  modified_base (12)..(12): 2'-hydroxy corresponding base
  modified_base (13)..(13): 2'-hydroxy corresponding base
  modified_base (14)..(14): 2'-hydroxy corresponding base
  modified_base (15)..(15): 2'-hydroxy corresponding base
  modified_base (16)..(16): 2'-hydroxy corresponding base
  modified_base (17)..(17): 2'-hydroxy corresponding base
  modified_base (18)..(18): 2'-hydroxy corresponding base
  modified_base (19)..(19): 2'-hydroxy corresponding base
  modified_base (20)..(20): deoxythymidine
  modified_base (21)..(21): 5'-thio thymidine
uuccgaauaaacuccaggctt

SEQ ID NO: 1321 - DNA, 21 bp, Artificial Sequence
  Description of Artificial Sequence: Synthetic oligonucleotide
  Description of Combined DNA/RNA Molecule: Synthetic oligonucleotide
  siRNAs to PCSK9
  modified_base (1)..(1): 2'-hydroxy corresponding base
  modified_base (2)..(2): 2'-hydroxy corresponding base
  modified_base (3)..(3): 2'-hydroxy corresponding base
  modified_base (4)..(4): 2'-hydroxy corresponding base
  modified_base (5)..(5): 2'-hydroxy corresponding base
  modified_base (6)..(6): 2'-hydroxy corresponding base
  modified_base (7)..(7): 2'-hydroxy corresponding base
  modified_base (8)..(8): 2'-hydroxy corresponding base
  modified_base (9)..(9): 2'-hydroxy corresponding base
  modified_base (10)..(10): 2'-hydroxy corresponding base
  modified_base (11)..(11): 2'-hydroxy corresponding base
  modified_base (12)..(12): 2'-hydroxy corresponding base
  modified_base (13)..(13): 2'-hydroxy corresponding base
  modified_base (14)..(14): 2'-hydroxy corresponding base
  modified_base (15)..(15): 2'-hydroxy corresponding base
  modified_base (16)..(16): 2'-hydroxy corresponding base
  modified_base (17)..(17): 2'-hydroxy corresponding base
  modified_base (18)..(18): 2'-hydroxy corresponding base
  modified_base (19)..(19): 2'-hydroxy corresponding base
  modified_base (20)..(20): deoxythymidine
  modified_base (21)..(21): 5'-thio thymidine
gccuggaguuuauucggaatt

SEQ ID NO: 1322 - DNA, 21 bp, Artificial Sequence
  Description of Artificial Sequence: Synthetic oligonucleotide
  Description of Combined DNA/RNA Molecule: Synthetic oligonucleotide
  siRNAs to PCSK9
  modified_base (1)..(1): 2'-hydroxy corresponding base
  modified_base (2)..(2): 2'-O-methyl corresponding base
  modified_base (3)..(3): 2'-hydroxy corresponding base
  modified_base (4)..(4): 2'-hydroxy corresponding base
  modified_base (5)..(5): 2'-hydroxy corresponding base
  modified_base (6)..(6): 2'-hydroxy corresponding base
  modified_base (7)..(7): 2'-hydroxy corresponding base
  modified_base (8)..(8): 2'-hydroxy corresponding base
  modified_base (9)..(9): 2'-hydroxy corresponding base
  modified_base (10)..(10): 2'-hydroxy corresponding base
  modified_base (11)..(11): 2'-hydroxy corresponding base
  modified_base (12)..(12): 2'-hydroxy corresponding base
  modified_base (13)..(13): 2'-hydroxy corresponding base
  modified_base (14)..(14): 2'-hydroxy corresponding base
  modified_base (15)..(15): 2'-hydroxy corresponding base
  modified_base (16)..(16): 2'-hydroxy corresponding base
  modified_base (17)..(17): 2'-hydroxy corresponding base
  modified_base (18)..(18): 2'-hydroxy corresponding base
  modified_base (19)..(19): 2'-hydroxy corresponding base
  modified_base (20)..(20): deoxythymidine
  modified_base (21)..(21): 5'-thio thymidine
uuccgaauaaacuccaggctt

SEQ ID NO: 1323 - DNA, 21 bp, Artificial Sequence
  Description of Artificial Sequence: Synthetic oligonucleotide
  Description of Combined DNA/RNA Molecule: Synthetic oligonucleotide
  siRNAs to PCSK9
  modified_base (1)..(1): 2'-hydroxy corresponding base
  modified_base (2)..(2): 2'-hydroxy corresponding base
  modified_base (3)..(3): 2'-hydroxy corresponding base
  modified_base (4)..(4): 2'-hydroxy corresponding base
  modified_base (5)..(5): 2'-hydroxy corresponding base
  modified_base (6)..(6): 2'-hydroxy corresponding base
  modified_base (7)..(7): 2'-hydroxy corresponding base
  modified_base (8)..(8): 2'-hydroxy corresponding base
  modified_base (9)..(9): 2'-hydroxy corresponding base
  modified_base (10)..(10): 2'-hydroxy corresponding base
  modified_base (11)..(11): 2'-hydroxy corresponding base
  modified_base (12)..(12): 2'-hydroxy corresponding base
  modified_base (13)..(13): 2'-hydroxy corresponding base
  modified_base (14)..(14): 2'-hydroxy corresponding base
  modified_base (15)..(15): 2'-hydroxy corresponding base
  modified_base (16)..(16): 2'-hydroxy corresponding base
  modified_base (17)..(17): 2'-hydroxy corresponding base
  modified_base (18)..(18): 2'-hydroxy corresponding base
  modified_base (19)..(19): 2'-hydroxy corresponding base
  modified_base (20)..(20): deoxythymidine
  modified_base (21)..(21): 5'-thio thymidine
gccuggaguuuauucggaatt

SEQ ID NO: 1324 - DNA, 21 bp, Artificial Sequence
  Description of Artificial Sequence: Synthetic oligonucleotide
  Description of Combined DNA/RNA Molecule: Synthetic oligonucleotide
  siRNAs to PCSK9
  modified_base (1)..(1): 2'-hydroxy corresponding base
  modified_base (2)..(2): 2'-hydroxy corresponding base
  modified_base (3)..(3): 2'-O-methyl corresponding base
  modified_base (4)..(4): 2'-hydroxy corresponding base
  modified_base (5)..(5): 2'-hydroxy corresponding base
  modified_base (6)..(6): 2'-hydroxy corresponding base
  modified_base (7)..(7): 2'-hydroxy corresponding base
  modified_base (8)..(8): 2'-hydroxy corresponding base
  modified_base (9)..(9): 2'-hydroxy corresponding base
  modified_base (10)..(10): 2'-hydroxy corresponding base
  modified_base (11)..(11): 2'-hydroxy corresponding base
  modified_base (12)..(12): 2'-hydroxy corresponding base
  modified_base (13)..(13): 2'-hydroxy corresponding base
  modified_base (14)..(14): 2'-hydroxy corresponding base
  modified_base (15)..(15): 2'-hydroxy corresponding base
  modified_base (16)..(16): 2'-hydroxy corresponding base
  modified_base (17)..(17): 2'-hydroxy corresponding base
  modified_base (18)..(18): 2'-hydroxy corresponding base
  modified_base (19)..(19): 2'-hydroxy corresponding base
  modified_base (20)..(20): deoxythymidine
  modified_base (21)..(21): 5'-thio thymidine
uuccgaauaaacuccaggctt

SEQ ID NO: 1325 - DNA, 21 bp, Artificial Sequence
  Description of Artificial Sequence: Synthetic oligonucleotide
  Description of Combined DNA/RNA Molecule: Synthetic oligonucleotide
  siRNAs to PCSK9
  modified_base (1)..(1): 2'-hydroxy corresponding base
  modified_base (2)..(2): 2'-hydroxy corresponding base
  modified_base (3)..(3): 2'-hydroxy corresponding base
  modified_base (4)..(4): 2'-hydroxy corresponding base
  modified_base (5)..(5): 2'-hydroxy corresponding base
  modified_base (6)..(6): 2'-hydroxy corresponding base
  modified_base (7)..(7): 2'-hydroxy corresponding base
  modified_base (8)..(8): 2'-hydroxy corresponding base
  modified_base (9)..(9): 2'-hydroxy corresponding base
  modified_base (10)..(10): 2'-hydroxy corresponding base
  modified_base (11)..(11): 2'-hydroxy corresponding base
  modified_base (12)..(12): 2'-hydroxy corresponding base
  modified_base (13)..(13): 2'-hydroxy corresponding base
  modified_base (14)..(14): 2'-hydroxy corresponding base
  modified_base (15)..(15): 2'-hydroxy corresponding base
  modified_base (16)..(16): 2'-hydroxy corresponding base
  modified_base (17)..(17): 2'-hydroxy corresponding base
  modified_base (18)..(18): 2'-hydroxy corresponding base
  modified_base (19)..(19): 2'-hydroxy corresponding base
  modified_base (20)..(20): deoxythymidine
  modified_base (21)..(21): 5'-thio thymidine
gccuggaguuuauucggaatt

SEQ ID NO: 1326 - DNA, 21 bp, Artificial Sequence
  Description of Artificial Sequence: Synthetic oligonucleotide
  Description of Combined DNA/RNA Molecule: Synthetic oligonucleotide
  siRNAs to PCSK9
  modified_base (1)..(1): 2'-hydroxy corresponding base
  modified_base (2)..(2): 2'-hydroxy corresponding base
  modified_base (3)..(3): 2'-hydroxy corresponding base
  modified_base (4)..(4): 2'-O-methyl corresponding base
  modified_base (5)..(5): 2'-hydroxy corresponding base
  modified_base (6)..(6): 2'-hydroxy corresponding base
  modified_base (7)..(7): 2'-hydroxy corresponding base
  modified_base (8)..(8): 2'-hydroxy corresponding base
  modified_base (9)..(9): 2'-hydroxy corresponding base
  modified_base (10)..(10): 2'-hydroxy corresponding base
  modified_base (11)..(11): 2'-hydroxy corresponding base
  modified_base (12)..(12): 2'-hydroxy corresponding base
  modified_base (13)..(13): 2'-hydroxy corresponding base
  modified_base (14)..(14): 2'-hydroxy corresponding base
  modified_base (15)..(15): 2'-hydroxy corresponding base
  modified_base (16)..(16): 2'-hydroxy corresponding base
  modified_base (17)..(17): 2'-hydroxy corresponding base
  modified_base (18)..(18): 2'-hydroxy corresponding base
  modified_base (19)..(19): 2'-hydroxy corresponding base
  modified_base (20)..(20): deoxythymidine
  modified_base (21)..(21): 5'-thio thymidine
uuccgaauaaacuccaggctt

SEQ ID NO: 1327 - RNA, 19 nt, Artificial Sequence
  Description of Artificial Sequence: Synthetic oligonucleotide
  siRNAs to PCSK9
  modified_base (1)..(1): 2'-hydroxy corresponding base
  modified_base (2)..(2): 2'-O-methyl corresponding base
  modified_base (3)..(3): 2'-O-methyl corresponding base
  modified_base (4)..(4): 2'-O-methyl corresponding base
  modified_base (5)..(5): 2'-hydroxy corresponding base
  modified_base (6)..(6): 2'-hydroxy corresponding base
  modified_base (7)..(7): 2'-hydroxy corresponding base
  modified_base (8)..(8): 2'-hydroxy corresponding base
  modified_base (9)..(9): 2'-O-methyl corresponding base
  modified_base (10)..(10): 2'-O-methyl corresponding base
  modified_base (11)..(11): 2'-O-methyl corresponding base
  modified_base (12)..(12): 2'-hydroxy corresponding base
  modified_base (13)..(13): 2'-O-methyl corresponding base
  modified_base (14)..(14): 2'-O-methyl corresponding base
  modified_base (15)..(15): 2'-O-methyl corresponding base
  modified_base (16)..(16): 2'-hydroxy corresponding base
  modified_base (17)..(17): 2'-hydroxy corresponding base
  modified_base (18)..(18): 2'-hydroxy corresponding base
  modified_base (19)..(19): 2'-hydroxy corresponding base
gccuggaguuuauucggaa

SEQ ID NO: 1328 - RNA, 21 nt, Artificial Sequence
  Description of Artificial Sequence: Synthetic oligonucleotide
  siRNAs to PCSK9
  modified_base (1)..(1): 2'-hydroxy corresponding base
  modified_base (2)..(2): 2'-hydroxy corresponding base
  modified_base (3)..(3): 2'-hydroxy corresponding base
  modified_base (4)..(4): 2'-hydroxy corresponding base
  modified_base (5)..(5): 2'-hydroxy corresponding base
  modified_base (6)..(6): 2'-hydroxy corresponding base
  modified_base (7)..(7): 2'-hydroxy corresponding base
  modified_base (8)..(8): 2'-hydroxy corresponding base
  modified_base (9)..(9): 2'-hydroxy corresponding base
  modified_base (10)..(10): 2'-hydroxy corresponding base
  modified_base (11)..(11): 2'-hydroxy corresponding base
  modified_base (12)..(12): 2'-hydroxy corresponding base
  modified_base (13)..(13): 2'-hydroxy corresponding base
  modified_base (14)..(14): 2'-hydroxy corresponding base
  modified_base (15)..(15): 2'-hydroxy corresponding base
  modified_base (16)..(16): 2'-hydroxy corresponding base
  modified_base (17)..(17): 2'-hydroxy corresponding base
  modified_base (18)..(18): 2'-hydroxy corresponding base
  modified_base (19)..(19): 2'-hydroxy corresponding base
  modified_base (20)..(20): 2'-O-methyl corresponding base 5'-monophosphorothioate
  modified_base (21)..(21): 2'-O-methyl corresponding base 5'-monophosphorothioate
uuccgaauaaacuccaggccu

SEQ ID NO: 1329 - RNA, 20 nt, Artificial Sequence
  Description of Artificial Sequence: Synthetic oligonucleotide
  siRNAs to PCSK9
  modified_base (1)..(1): 2'-hydroxy corresponding base
  modified_base (2)..(2): 2'-O-methyl corresponding base
  modified_base (3)..(3): 2'-O-methyl corresponding base
  modified_base (4)..(4): 2'-O-methyl corresponding base
  modified_base (5)..(5): 2'-hydroxy corresponding base
  modified_base (6)..(6): 2'-hydroxy corresponding base
  modified_base (7)..(7): 2'-hydroxy corresponding base
  modified_base (8)..(8): 2'-hydroxy corresponding base
  modified_base (9)..(9): 2'-O-methyl corresponding base
  modified_base (10)..(10): 2'-O-methyl corresponding base
  modified_base (11)..(11): 2'-O-methyl corresponding base
  modified_base (12)..(12): 2'-hydroxy corresponding base
  modified_base (13)..(13): 2'-O-methyl corresponding base
  modified_base (14)..(14): 2'-O-methyl corresponding base
  modified_base (15)..(15): 2'-O-methyl corresponding base
  modified_base (16)..(16): 2'-hydroxy corresponding base
  modified_base (17)..(17): 2'-hydroxy corresponding base
  modified_base (18)..(18): 2'-hydroxy corresponding base
  modified_base (19)..(19): 2'-hydroxy corresponding base
  modified_base (20)..(20): 2'-hydroxy corresponding base
gccuggaguuuauucggaaa

SEQ ID NO: 1330 - RNA, 22 nt, Artificial Sequence
  Description of Artificial Sequence: Synthetic oligonucleotide
  siRNAs to PCSK9
  modified_base (1)..(1): 2'-hydroxy corresponding base
  modified_base (2)..(2): 2'-hydroxy corresponding base
  modified_base (3)..(3): 2'-hydroxy corresponding base
  modified_base (4)..(4): 2'-hydroxy corresponding base
  modified_base (5)..(5): 2'-hydroxy corresponding base
  modified_base (6)..(6): 2'-hydroxy corresponding base
  modified_base (7)..(7): 2'-hydroxy corresponding base
  modified_base (8)..(8): 2'-hydroxy corresponding base
  modified_base (9)..(9): 2'-hydroxy corresponding base
  modified_base (10)..(10): 2'-hydroxy corresponding base
  modified_base (11)..(11): 2'-hydroxy corresponding base
  modified_base (12)..(12): 2'-hydroxy corresponding base
  modified_base (13)..(13): 2'-hydroxy corresponding base
  modified_base (14)..(14): 2'-hydroxy corresponding base
  modified_base (15)..(15): 2'-hydroxy corresponding base
  modified_base (16)..(16): 2'-hydroxy corresponding base
  modified_base (17)..(17): 2'-hydroxy corresponding base
  modified_base (18)..(18): 2'-hydroxy corresponding base
  modified_base (19)..(19): 2'-hydroxy corresponding base
  modified_base (20)..(20): 2'-hydroxy corresponding base
  modified_base (21)..(21): 2'-O-methyl corresponding base 5'-monophosphorothioate
  modified_base (22)..(22): 2'-O-methyl corresponding base 5'-monophosphorothioate
uuuccgaauaaacuccaggccu

SEQ ID NO: 1331 - RNA, 21 nt, Artificial Sequence
  Description of Artificial Sequence: Synthetic oligonucleotide
  siRNAs to PCSK9
  modified_base (1)..(1): 2'-hydroxy corresponding base
  modified_base (2)..(2): 2'-O-methyl corresponding base
  modified_base (3)..(3): 2'-O-methyl corresponding base
  modified_base (4)..(4): 2'-O-methyl corresponding base
  modified_base (5)..(5): 2'-hydroxy corresponding base
  modified_base (6)..(6): 2'-hydroxy corresponding base
  modified_base (7)..(7): 2'-hydroxy corresponding base
  modified_base (8)..(8): 2'-hydroxy corresponding base
  modified_base (9)..(9): 2'-O-methyl corresponding base
  modified_base (10)..(10): 2'-O-methyl corresponding base
  modified_base (11)..(11): 2'-O-methyl corresponding base
  modified_base (12)..(12): 2'-hydroxy corresponding base
  modified_base (13)..(13): 2'-O-methyl corresponding base
  modified_base (14)..(14): 2'-O-methyl corresponding base
  modified_base (15)..(15): 2'-O-methyl corresponding base
  modified_base (16)..(16): 2'-hydroxy corresponding base
  modified_base (17)..(17): 2'-hydroxy corresponding base
  modified_base (18)..(18): 2'-hydroxy corresponding base
  modified_base (19)..(19): 2'-hydroxy corresponding base
  modified_base (20)..(20): 2'-hydroxy corresponding base
  modified_base (21)..(21): 2'-hydroxy corresponding base
gccuggaguuuauucggaaaa

SEQ ID NO: 1332 - RNA, 23 nt, Artificial Sequence
  Description of Artificial Sequence: Synthetic oligonucleotide
  siRNAs to PCSK9
  modified_base (1)..(1): 2'-hydroxy corresponding base
  modified_base (2)..(2): 2'-hydroxy corresponding base
  modified_base (3)..(3): 2'-hydroxy corresponding base
  modified_base (4)..(4): 2'-hydroxy corresponding base
  modified_base (5)..(5): 2'-hydroxy corresponding base
  modified_base (6)..(6): 2'-hydroxy corresponding base
  modified_base (7)..(7): 2'-hydroxy corresponding base
  modified_base (8)..(8): 2'-hydroxy corresponding base
  modified_base (9)..(9): 2'-hydroxy corresponding base
  modified_base (10)..(10): 2'-hydroxy corresponding base
  modified_base (11)..(11): 2'-hydroxy corresponding base
  modified_base (12)..(12): 2'-hydroxy corresponding base
  modified_base (13)..(13): 2'-hydroxy corresponding base
  modified_base (14)..(14): 2'-hydroxy corresponding base
  modified_base (15)..(15): 2'-hydroxy corresponding base
  modified_base (16)..(16): 2'-hydroxy corresponding base
  modified_base (17)..(17): 2'-hydroxy corresponding base
  modified_base (18)..(18): 2'-hydroxy corresponding base
  modified_base (19)..(19): 2'-hydroxy corresponding base
  modified_base (20)..(20): 2'-hydroxy corresponding base
  modified_base (21)..(21): 2'-hydroxy corresponding base
  modified_base (22)..(22): 2'-O-methyl corresponding base 5'-monophosphorothioate
  modified_base (23)..(23): 2'-O-methyl corresponding base 5'-monophosphorothioate
uuuuccgaauaaacuccaggccu

SEQ ID NO: 1333 - RNA, 22 nt, Artificial Sequence
  Description of Artificial Sequence: Synthetic oligonucleotide
  siRNAs to PCSK9
  modified_base (1)..(1): 2'-hydroxy corresponding base
  modified_base (2)..(2): 2'-O-methyl corresponding base
  modified_base (3)..(3): 2'-O-methyl corresponding base
  modified_base (4)..(4): 2'-O-methyl corresponding base
  modified_base (5)..(5): 2'-hydroxy corresponding base
  modified_base (6)..(6): 2'-hydroxy corresponding base
  modified_base (7)..(7): 2'-hydroxy corresponding base
  modified_base (8)..(8): 2'-hydroxy corresponding base
  modified_base (9)..(9): 2'-O-methyl corresponding base
  modified_base (10)..(10): 2'-O-methyl corresponding base
  modified_base (11)..(11): 2'-O-methyl corresponding base
  modified_base (12)..(12): 2'-hydroxy corresponding base
  modified_base (13)..(13): 2'-O-methyl corresponding base
  modified_base (14)..(14): 2'-O-methyl corresponding base
  modified_base (15)..(15): 2'-O-methyl corresponding base
  modified_base (16)..(16): 2'-hydroxy corresponding base
  modified_base (17)..(17): 2'-hydroxy corresponding base
  modified_base (18)..(18): 2'-hydroxy corresponding base
  modified_base (19)..(19): 2'-hydroxy corresponding base
  modified_base (20)..(20): 2'-hydroxy corresponding base
  modified_base (21)..(21): 2'-hydroxy corresponding base
  modified_base (22)..(22): 2'-hydroxy corresponding base
gccuggaguuuauucggaaaag

SEQ ID NO: 1334 - RNA, 24 nt, Artificial Sequence
  Description of Artificial Sequence: Synthetic oligonucleotide
  siRNAs to PCSK9
  modified_base (1)..(1): 2'-hydroxy corresponding base
  modified_base (2)..(2): 2'-hydroxy corresponding base
  modified_base (3)..(3): 2'-hydroxy corresponding base
  modified_base (4)..(4): 2'-hydroxy corresponding base
  modified_base (5)..(5): 2'-hydroxy corresponding base
  modified_base (6)..(6): 2'-hydroxy corresponding base
  modified_base (7)..(7): 2'-hydroxy corresponding base
  modified_base (8)..(8): 2'-hydroxy corresponding base
  modified_base (9)..(9): 2'-hydroxy corresponding base
  modified_base (10)..(10): 2'-hydroxy corresponding base
  modified_base (11)..(11): 2'-hydroxy corresponding base
  modified_base (12)..(12): 2'-hydroxy corresponding base
  modified_base (13)..(13): 2'-hydroxy corresponding base
  modified_base (14)..(14): 2'-hydroxy corresponding base
  modified_base (15)..(15): 2'-hydroxy corresponding base
  modified_base (16)..(16): 2'-hydroxy corresponding base
  modified_base (17)..(17): 2'-hydroxy corresponding base
  modified_base (18)..(18): 2'-hydroxy corresponding base
  modified_base (19)..(19): 2'-hydroxy corresponding base
  modified_base (20)..(20): 2'-hydroxy corresponding base
  modified_base (21)..(21): 2'-hydroxy corresponding base
  modified_base (22)..(22): 2'-hydroxy corresponding base
  modified_base (23)..(23): 2'-O-methyl corresponding base 5'-monophosphorothioate
  modified_base (24)..(24): 2'-O-methyl corresponding base 5'-monophosphorothioate
cuuuuccgaauaaacuccaggccu

SEQ ID NO: 1335 - DNA, 22 bp, Artificial Sequence
  Description of Artificial Sequence: Synthetic oligonucleotide
  Description of Combined DNA/RNA Molecule: Synthetic oligonucleotide
  siRNAs to PCSK9
  modified_base (1)..(1): 2'-hydroxy corresponding base
  modified_base (2)..(2): 2'-O-methyl corresponding base
  modified_base (3)..(3): 2'-O-methyl corresponding base
  modified_base (4)..(4): 2'-O-methyl corresponding base
  modified_base (5)..(5): 2'-hydroxy corresponding base
  modified_base (6)..(6): 2'-hydroxy corresponding base
  modified_base (7)..(7): 2'-hydroxy corresponding base
  modified_base (8)..(8): 2'-hydroxy corresponding base
  modified_base (9)..(9): 2'-O-methyl corresponding base
  modified_base (10)..(10): 2'-O-methyl corresponding base
  modified_base (11)..(11): 2'-O-methyl corresponding base
  modified_base (12)..(12): 2'-hydroxy corresponding base
  modified_base (13)..(13): 2'-O-methyl corresponding base
  modified_base (14)..(14): 2'-O-methyl corresponding base
  modified_base (15)..(15): 2'-O-methyl corresponding base
  modified_base (16)..(16): 2'-hydroxy corresponding base
  modified_base (17)..(17): 2'-hydroxy corresponding base
  modified_base (18)..(18): 2'-hydroxy corresponding base
  modified_base (19)..(19): 2'-hydroxy corresponding base
  modified_base (20)..(20): deoxythymidine
  modified_base (21)..(21): deoxythymidine
  modified_base (22)..(22): abasic nucleotide
gccuggaguuuauucggaattn

SEQ ID NO: 1336 - DNA, 22 bp, Artificial Sequence
  Description of Artificial Sequence: Synthetic oligonucleotide
  Description of Combined DNA/RNA Molecule: Synthetic oligonucleotide
  siRNAs to PCSK9
  modified_base (1)..(1): 2'-hydroxy corresponding base
  modified_base (2)..(2): 2'-hydroxy corresponding base
  modified_base (3)..(3): 2'-hydroxy corresponding base
  modified_base (4)..(4): 2'-hydroxy corresponding base
  modified_base (5)..(5): 2'-hydroxy corresponding base
  modified_base (6)..(6): 2'-hydroxy corresponding base
  modified_base (7)..(7): 2'-hydroxy corresponding base
  modified_base (8)..(8): 2'-hydroxy corresponding base
  modified_base (9)..(9): 2'-hydroxy corresponding base
  modified_base (10)..(10): 2'-hydroxy corresponding base
  modified_base (11)..(11): 2'-hydroxy corresponding base
  modified_base (12)..(12): 2'-hydroxy corresponding base
  modified_base (13)..(13): 2'-hydroxy corresponding base
  modified_base (14)..(14): 2'-hydroxy corresponding base
  modified_base (15)..(15): 2'-hydroxy corresponding base
  modified_base (16)..(16): 2'-hydroxy corresponding base
  modified_base (17)..(17): 2'-hydroxy corresponding base
  modified_base (18)..(18): 2'-hydroxy corresponding base
  modified_base (19)..(19): 2'-hydroxy corresponding base
  modified_base (20)..(20): deoxythymidine
  modified_base (21)..(21): deoxythymidine
  modified_base (22)..(22): abasic nucleotide
uuccgaauaaacuccaggcttn

SEQ ID NO: 1337 - DNA, 23 bp, Artificial Sequence
  Description of Artificial Sequence: Synthetic oligonucleotide
  Description of Combined DNA/RNA Molecule: Synthetic oligonucleotide
  siRNAs to PCSK9
  modified_base (1)..(1): 2'-hydroxy corresponding base
  modified_base (2)..(2): 2'-O-methyl corresponding base
  modified_base (3)..(3): 2'-O-methyl corresponding base
  modified_base (4)..(4): 2'-O-methyl corresponding base
  modified_base (5)..(5): 2'-hydroxy corresponding base
  modified_base (6)..(6): 2'-hydroxy corresponding base
  modified_base (7)..(7): 2'-hydroxy corresponding base
  modified_base (8)..(8): 2'-hydroxy corresponding base
  modified_base (9)..(9): 2'-O-methyl corresponding base
  modified_base (10)..(10): 2'-O-methyl corresponding base
  modified_base (11)..(11): 2'-O-methyl corresponding base
  modified_base (12)..(12): 2'-hydroxy corresponding base
  modified_base (13)..(13): 2'-O-methyl corresponding base
  modified_base (14)..(14): 2'-O-methyl corresponding base
  modified_base (15)..(15): 2'-O-methyl corresponding base
  modified_base (16)..(16): 2'-hydroxy corresponding base
  modified_base (17)..(17): 2'-hydroxy corresponding base
  modified_base (18)..(18): 2'-hydroxy corresponding base
  modified_base (19)..(19): 2'-hydroxy corresponding base
  modified_base (20)..(20): 2'-hydroxy corresponding base
  modified_base (21)..(21): deoxythymidine
  modified_base (22)..(22): deoxythymidine
  modified_base (23)..(23): abasic nucleotide
gccuggaguuuauucggaaattn

SEQ ID NO: 1338 - DNA, 23 bp, Artificial Sequence
  Description of Artificial Sequence: Synthetic oligonucleotide
  Description of Combined DNA/RNA Molecule: Synthetic oligonucleotide
  siRNAs to PCSK9
  modified_base (1)..(1): 2'-hydroxy corresponding base
  modified_base (2)..(2): 2'-hydroxy corresponding base
  modified_base (3)..(3): 2'-hydroxy corresponding base
  modified_base (4)..(4): 2'-hydroxy corresponding base
  modified_base (5)..(5): 2'-hydroxy corresponding base
  modified_base (6)..(6): 2'-hydroxy corresponding base
  modified_base (7)..(7): 2'-hydroxy corresponding base
  modified_base (8)..(8): 2'-hydroxy corresponding base
  modified_base (9)..(9): 2'-O-methyl corresponding base
  modified_base (10)..(10): 2'-hydroxy corresponding base
  modified_base (11)..(11): 2'-hydroxy corresponding base
  modified_base (12)..(12): 2'-hydroxy corresponding base
  modified_base (13)..(13): 2'-hydroxy corresponding base
  modified_base (14)..(14): 2'-hydroxy corresponding base
  modified_base (15)..(15): 2'-hydroxy corresponding base
  modified_base (16)..(16): 2'-hydroxy corresponding base
  modified_base (17)..(17): 2'-hydroxy corresponding base
  modified_base (18)..(18): 2'-hydroxy corresponding base
  modified_base (19)..(19): 2'-hydroxy corresponding base
  modified_base (20)..(20): 2'-hydroxy corresponding base
  modified_base (21)..(21): deoxythymidine
  modified_base (22)..(22): deoxythymidine
  modified_base (23)..(23): abasic nucleotide
uuuccgaauaaacuccaggcttn

SEQ ID NO: 1339 - DNA, 24 bp, Artificial Sequence
  Description of Artificial Sequence: Synthetic oligonucleotide
  Description of Combined DNA/RNA Molecule: Synthetic oligonucleotide
  siRNAs to PCSK9
  modified_base (1)..(1): 2'-hydroxy corresponding base
  modified_base (2)..(2): 2'-O-methyl corresponding base
  modified_base (3)..(3): 2'-O-methyl corresponding base
  modified_base (4)..(4): 2'-O-methyl corresponding base
  modified_base (5)..(5): 2'-hydroxy corresponding base
  modified_base (6)..(6): 2'-hydroxy corresponding base
  modified_base (7)..(7): 2'-hydroxy corresponding base
  modified_base (8)..(8): 2'-hydroxy corresponding base
  modified_base (9)..(9): 2'-O-methyl corresponding base
  modified_base (10)..(10): 2'-O-methyl corresponding base
  modified_base (11)..(11): 2'-O-methyl corresponding base
  modified_base (12)..(12): 2'-hydroxy corresponding base
  modified_base (13)..(13): 2'-O-methyl corresponding base
  modified_base (14)..(14): 2'-O-methyl corresponding base
  modified_base (15)..(15): 2'-O-methyl corresponding base
  modified_base (16)..(16): 2'-hydroxy corresponding base
  modified_base (17)..(17): 2'-hydroxy corresponding base
  modified_base (18)..(18): 2'-hydroxy corresponding base
  modified_base (19)..(19): 2'-hydroxy corresponding base
  modified_base (20)..(20): 2'-hydroxy corresponding base
  modified_base (21)..(21): 2'-hydroxy corresponding base
  modified_base (22)..(22): deoxythymidine
  modified_base (23)..(23): deoxythymidine
  modified_base (24)..(24): abasic nucleotide
gccuggaguuuauucggaaaattn

SEQ ID NO: 1340 - DNA, 24 bp, Artificial Sequence
  Description of Artificial Sequence: Synthetic oligonucleotide
  Description of Combined DNA/RNA Molecule: Synthetic oligonucleotide
  siRNAs to PCSK9
  modified_base (1)..(1): 2'-hydroxy corresponding base
  modified_base (2)..(2): 2'-hydroxy corresponding base
  modified_base (3)..(3): 2'-hydroxy corresponding base
  modified_base (4)..(4): 2'-hydroxy corresponding base
  modified_base (5)..(5): 2'-hydroxy corresponding base
  modified_base (6)..(6): 2'-hydroxy corresponding base
  modified_base (7)..(7): 2'-hydroxy corresponding base
  modified_base (8)..(8): 2'-hydroxy corresponding base
  modified_base (9)..(9): 2'-hydroxy corresponding base
  modified_base (10)..(10): 2'-hydroxy corresponding base
  modified_base (11)..(11): 2'-hydroxy corresponding base
  modified_base (12)..(12): 2'-hydroxy corresponding base
  modified_base (13)..(13): 2'-hydroxy corresponding base
  modified_base (14)..(14): 2'-hydroxy corresponding base
  modified_base (15)..(15): 2'-hydroxy corresponding base
  modified_base (16)..(16): 2'-hydroxy corresponding base
  modified_base (17)..(17): 2'-hydroxy corresponding base
  modified_base (18)..(18): 2'-hydroxy corresponding base
  modified_base (19)..(19): 2'-hydroxy corresponding base
  modified_base (20)..(20): 2'-hydroxy corresponding base
  modified_base (21)..(21): 2'-hydroxy corresponding base
  modified_base (22)..(22): deoxythymidine
  modified_base (23)..(23): deoxythymidine
  modified_base (24)..(24): abasic nucleotide
uuuuccgaauaaacuccaggcttn

SEQ ID NO: 1341 - DNA, 25 bp, Artificial Sequence
  Description of Artificial Sequence: Synthetic oligonucleotide
  Description of Combined DNA/RNA Molecule: Synthetic oligonucleotide
  siRNAs to PCSK9
  modified_base (1)..(1): 2'-hydroxy corresponding base
  modified_base (2)..(2): 2'-O-methyl corresponding base
  modified_base (3)..(3): 2'-O-methyl corresponding base
  modified_base (4)..(4): 2'-O-methyl corresponding base
  modified_base (5)..(5): 2'-hydroxy corresponding base
  modified_base (6)..(6): 2'-hydroxy corresponding base
  modified_base (7)..(7): 2'-hydroxy corresponding base
  modified_base (8)..(8): 2'-hydroxy corresponding base
  modified_base (9)..(9): 2'-O-methyl corresponding base
  modified_base (10)..(10): 2'-O-methyl corresponding base
  modified_base (11)..(11): 2'-O-methyl corresponding base
  modified_base (12)..(12): 2'-hydroxy corresponding base
  modified_base (13)..(13): 2'-O-methyl corresponding base
  modified_base (14)..(14): 2'-O-methyl corresponding base
  modified_base (15)..(15): 2'-O-methyl corresponding base
  modified_base (16)..(16): 2'-hydroxy corresponding base
  modified_base (17)..(17): 2'-hydroxy corresponding base
  modified_base (18)..(18): 2'-hydroxy corresponding base
  modified_base (19)..(19): 2'-hydroxy corresponding base
  modified_base (20)..(20): 2'-hydroxy corresponding base
  modified_base (21)..(21): 2'-hydroxy corresponding base
  modified_base (22)..(22): 2'-hydroxy corresponding base
  modified_base (23)..(23): deoxythymidine
  modified_base (24)..(24): deoxythymidine
  modified_base (25)..(25): abasic nucleotide
gccuggaguuuauucggaaaagttn

SEQ ID NO: 1342 - DNA, 25 bp, Artificial Sequence
  Description of Artificial Sequence: Synthetic oligonucleotide
  Description of Combined DNA/RNA Molecule: Synthetic oligonucleotide
  siRNAs to PCSK9
  modified_base (1)..(1): 2'-hydroxy corresponding base
  modified_base (2)..(2): 2'-hydroxy corresponding base
  modified_base (3)..(3): 2'-hydroxy corresponding base
  modified_base (4)..(4): 2'-hydroxy corresponding base
  modified_base (5)..(5): 2'-hydroxy corresponding base
  modified_base (6)..(6): 2'-hydroxy corresponding base
  modified_base (7)..(7): 2'-hydroxy corresponding base
  modified_base (8)..(8): 2'-hydroxy corresponding base
  modified_base (9)..(9): 2'-hydroxy corresponding base
  modified_base (10)..(10): 2'-hydroxy corresponding base
  modified_base (11)..(11): 2'-hydroxy corresponding base
  modified_base (12)..(12): 2'-hydroxy corresponding base
  modified_base (13)..(13): 2'-hydroxy corresponding base
  modified_base (14)..(14): 2'-hydroxy corresponding base
  modified_base (15)..(15): 2'-hydroxy corresponding base
  modified_base (16)..(16): 2'-hydroxy corresponding base
  modified_base (17)..(17): 2'-hydroxy corresponding base
  modified_base (18)..(18): 2'-hydroxy corresponding base
  modified_base (19)..(19): 2'-hydroxy corresponding base
  modified_base (20)..(20): 2'-hydroxy corresponding base
  modified_base (21)..(21): 2'-hydroxy corresponding base
  modified_base (22)..(22): 2'-hydroxy corresponding base
  modified_base (23)..(23): deoxythymidine
  modified_base (24)..(24): deoxythymidine
  modified_base (25)..(25): abasic nucleotide
cuuuuccgaauaaacuccaggcttn

SEQ ID NO: 1343 - DNA, 21 bp, Artificial Sequence
  Description of Artificial Sequence: Synthetic oligonucleotide
  Description of Combined DNA/RNA Molecule: Synthetic oligonucleotide
  siRNAs to PCSK9
  modified_base (1)..(1): 2'-hydroxy corresponding base
  modified_base (2)..(2): 2'-hydroxy corresponding base
  modified_base (3)..(3): 2'-hydroxy corresponding base
  modified_base (4)..(4): 2'-hydroxy corresponding base
  modified_base (5)..(5): 2'-hydroxy corresponding base
  modified_base (6)..(6): 2'-hydroxy corresponding base
  modified_base (7)..(7): 2'-hydroxy corresponding base
  modified_base (8)..(8): 2'-hydroxy corresponding base
  modified_base (9)..(9): 2'-hydroxy corresponding base
  modified_base (10)..(10): 2'-hydroxy corresponding base
  modified_base (11)..(11): 2'-hydroxy corresponding base
  modified_base (12)..(12): 2'-hydroxy corresponding base
  modified_base (13)..(13): 2'-hydroxy corresponding base
  modified_base (14)..(14): 2'-hydroxy corresponding base
  modified_base (15)..(15): 2'-hydroxy corresponding base
  modified_base (16)..(16): 2'-hydroxy corresponding base
  modified_base (17)..(17): 2'-hydroxy corresponding base
  modified_base (18)..(18): 2'-hydroxy corresponding base
  modified_base (19)..(19): 2'-hydroxy corresponding base
  modified_base (20)..(20): deoxythymidine
  modified_base (21)..(21): 5'-thio thymidine
gccuggaguuuauucggaatt

SEQ ID NO: 1344 - RNA, 21 nt, Artificial Sequence
  Description of Artificial Sequence: Synthetic oligonucleotide
  siRNAs to PCSK9
  modified_base (1)..(1): 2'-hydroxy corresponding base
  modified_base (2)..(2): 2'-hydroxy corresponding base
  modified_base (3)..(3): 2'-hydroxy corresponding base
  modified_base (4)..(4): 2'-hydroxy corresponding base
  modified_base (5)..(5): 2'-hydroxy corresponding base
  modified_base (6)..(6): 2'-hydroxy corresponding base
  modified_base (7)..(7): 2'-hydroxy corresponding base
  modified_base (8)..(8): 2'-hydroxy corresponding base
  modified_base (9)..(9): 2'-hydroxy corresponding base
  modified_base (10)..(10): 2'-hydroxy corresponding base
  modified_base (11)..(11): 2'-hydroxy corresponding base
  modified_base (12)..(12): 2'-hydroxy corresponding base
  modified_base (13)..(13): 2'-hydroxy corresponding base
  modified_base (14)..(14): 2'-hydroxy corresponding base
  modified_base (15)..(15): 2'-hydroxy corresponding base
  modified_base (16)..(16): 2'-hydroxy corresponding base
  modified_base (17)..(17): 2'-hydroxy corresponding base
  modified_base (18)..(18): 2'-hydroxy corresponding base
  modified_base (19)..(19): 2'-hydroxy corresponding base
  modified_base (20)..(20): 2'-O-methyl corresponding base 5'-monophosphorothioate
  modified_base (21)..(21): 2'-O-methyl corresponding base 5'-monophosphorothioate
uuccgaauaaacuccaggccu

SEQ ID NO: 1345 - DNA, 21 bp, Artificial Sequence
  Description of Artificial Sequence: Synthetic oligonucleotide
  Description of Combined DNA/RNA Molecule: Synthetic oligonucleotide
  siRNAs to PCSK9
  modified_base (1)..(1): 2'-hydroxy corresponding base
  modified_base (2)..(2): 2'-O-methyl corresponding base
  modified_base (3)..(3): 2'-O-methyl corresponding base
  modified_base (4)..(4): 2'-O-methyl corresponding base
  modified_base (5)..(5): 2'-hydroxy corresponding base
  modified_base (6)..(6): 2'-hydroxy corresponding base
  modified_base (7)..(7): 2'-hydroxy corresponding base
  modified_base (8)..(8): 2'-hydroxy corresponding base
  modified_base (9)..(9): 2'-O-methyl corresponding base
  modified_base (10)..(10): 2'-O-methyl corresponding base
  modified_base (11)..(11): 2'-O-methyl corresponding base
  modified_base (12)..(12): 2'-hydroxy corresponding base
  modified_base (13)..(13): 2'-O-methyl corresponding base
  modified_base (14)..(14): 2'-O-methyl corresponding base
  modified_base (15)..(15): 2'-O-methyl corresponding base
  modified_base (16)..(16): 2'-hydroxy corresponding base
  modified_base (17)..(17): 2'-hydroxy corresponding base
  modified_base (18)..(18): 2'-hydroxy corresponding base
  modified_base (19)..(19): 2'-hydroxy corresponding base
  modified_base (20)..(20): deoxythymidine
  modified_base (21)..(21): 5'-thio thymidine
gccuggaguuuauucggaatt

SEQ ID NO: 1346 - RNA, 21 nt, Artificial Sequence
  Description of Artificial Sequence: Synthetic oligonucleotide
  siRNAs to PCSK9
  modified_base (1)..(1): 2'-hydroxy corresponding base
  modified_base (2)..(2): 2'-hydroxy corresponding base
  modified_base (3)..(3): 2'-hydroxy corresponding base
  modified_base (4)..(4): 2'-hydroxy corresponding base
  modified_base (5)..(5): 2'-hydroxy corresponding base
  modified_base (6)..(6): 2'-hydroxy corresponding base
  modified_base (7)..(7): 2'-hydroxy corresponding base
  modified_base (8)..(8): 2'-hydroxy corresponding base
  modified_base (9)..(9): 2'-hydroxy corresponding base
  modified_base (10)..(10): 2'-hydroxy corresponding base
  modified_base (11)..(11): 2'-hydroxy corresponding base
  modified_base (12)..(12): 2'-hydroxy corresponding base
  modified_base (13)..(13): 2'-hydroxy corresponding base
  modified_base (14)..(14): 2'-hydroxy corresponding base
  modified_base (15)..(15): 2'-hydroxy corresponding base
  modified_base (16)..(16): 2'-hydroxy corresponding base
  modified_base (17)..(17): 2'-hydroxy corresponding base
  modified_base (18)..(18): 2'-hydroxy corresponding base
  modified_base (19)..(19): 2'-hydroxy corresponding base
  modified_base (20)..(20): 2'-O-methyl corresponding base 5'-monophosphorothioate
  modified_base (21)..(21): 2'-O-methyl corresponding base 5'-monophosphorothioate
uuccgaauaaacuccaggccu

SEQ ID NO: 1347 - RNA, 19 nt, Artificial Sequence
  Description of Artificial Sequence: Synthetic oligonucleotide
  siRNAs to PCSK9
  modified_base (1)..(1): 2'-hydroxy corresponding base
  modified_base (2)..(2): 2'-O-methyl corresponding base
  modified_base (3)..(3): 2'-hydroxy corresponding base
  modified_base (4)..(4): 2'-O-methyl corresponding base
  modified_base (5)..(5): 2'-hydroxy corresponding base
  modified_base (6)..(6): 2'-O-methyl corresponding base
  modified_base (7)..(7): 2'-hydroxy corresponding base
  modified_base (8)..(8): 2'-O-methyl corresponding base
  modified_base (9)..(9): 2'-hydroxy corresponding base
  modified_base (10)..(10): 2'-O-methyl corresponding base
  modified_base (11)..(11): 2'-hydroxy corresponding base
  modified_base (12)..(12): 2'-O-methyl corresponding base
  modified_base (13)..(13): 2'-hydroxy corresponding base
  modified_base (14)..(14): 2'-O-methyl corresponding base
  modified_base (15)..(15): 2'-hydroxy corresponding base
  modified_base (16)..(16): 2'-O-methyl corresponding base
  modified_base (17)..(17): 2'-hydroxy corresponding base
  modified_base (18)..(18): 2'-O-methyl corresponding base
  modified_base (19)..(19): 2'-hydroxy corresponding base
gccuggaguuuauucggaa

SEQ ID NO: 1348 - DNA, 22 bp, Artificial Sequence
  Description of Artificial Sequence: Synthetic oligonucleotide
  Description of Combined DNA/RNA Molecule: Synthetic oligonucleotide
  siRNAs to PCSK9
  modified_base (1)..(1): 2'-hydroxy corresponding base
  modified_base (2)..(2): 2'-hydroxy corresponding base
  modified_base (3)..(3): 2'-hydroxy corresponding base
  modified_base (4)..(4): 2'-hydroxy corresponding base
  modified_base (5)..(5): 2'-hydroxy corresponding base
  modified_base (6)..(6): 2'-hydroxy corresponding base
  modified_base (7)..(7): 2'-hydroxy corresponding base
  modified_base (8)..(8): 2'-hydroxy corresponding base
  modified_base (9)..(9): 2'-hydroxy corresponding base
  modified_base (10)..(10): 2'-hydroxy corresponding base
  modified_base (11)..(11): 2'-hydroxy corresponding base
  modified_base (12)..(12): 2'-hydroxy corresponding base
  modified_base (13)..(13): 2'-hydroxy corresponding base
  modified_base (14)..(14): 2'-hydroxy corresponding base
  modified_base (15)..(15): 2'-hydroxy corresponding base
  modified_base (16)..(16): 2'-hydroxy corresponding base
  modified_base (17)..(17): 2'-hydroxy corresponding base
  modified_base (18)..(18): 2'-hydroxy corresponding base
  modified_base (19)..(19): 2'-hydroxy corresponding base
  modified_base (20)..(20): deoxythymidine
  modified_base (21)..(21): deoxythymidine
  modified_base (22)..(22): abasic nucleotide
uuccgaauaaacuccaggcttn

SEQ ID NO: 1349 - RNA, 19 nt, Artificial Sequence
  Description of Artificial Sequence: Synthetic oligonucleotide
  siRNAs to PCSK9
  modified_base (1)..(1): 2'-hydroxy corresponding base
  modified_base (2)..(2): 2'-O-methyl corresponding base
  modified_base (3)..(3): 2'-hydroxy corresponding base
  modified_base (4)..(4): 2'-O-methyl corresponding base
  modified_base (5)..(5): 2'-hydroxy corresponding base
  modified_base (6)..(6): 2'-O-methyl corresponding base
  modified_base (7)..(7): 2'-hydroxy corresponding base
  modified_base (8)..(8): 2'-O-methyl corresponding base
  modified_base (9)..(9): 2'-hydroxy corresponding base
  modified_base (10)..(10): 2'-O-methyl corresponding base
  modified_base (11)..(11): 2'-hydroxy corresponding base
  modified_base (12)..(12): 2'-O-methyl corresponding base
  modified_base (13)..(13): 2'-hydroxy corresponding base
  modified_base (14)..(14): 2'-O-methyl corresponding base
  modified_base (15)..(15): 2'-hydroxy corresponding base
  modified_base (16)..(16): 2'-O-methyl corresponding base
  modified_base (17)..(17): 2'-hydroxy corresponding base
  modified_base (18)..(18): 2'-O-methyl corresponding base
  modified_base (19)..(19): 2'-hydroxy corresponding base
gccuggaguuuauucggaa

SEQ ID NO: 1350 - DNA, 21 bp, Artificial Sequence
  Description of Artificial Sequence: Synthetic oligonucleotide
  Description of Combined DNA/RNA Molecule: Synthetic oligonucleotide
  siRNAs to PCSK9
  modified_base (1)..(1): 2'-hydroxy corresponding base
  modified_base (2)..(2): 2'-hydroxy corresponding base
  modified_base (3)..(3): 2'-hydroxy corresponding base
  modified_base (4)..(4): 2'-hydroxy corresponding base
  modified_base (5)..(5): 2'-hydroxy corresponding base
  modified_base (6)..(6): 2'-hydroxy corresponding base
  modified_base (7)..(7): 2'-hydroxy corresponding base
  modified_base (8)..(8): 2'-hydroxy corresponding base
  modified_base (9)..(9): 2'-hydroxy corresponding base
  modified_base (10)..(10): 2'-hydroxy corresponding base
  modified_base (11)..(11): 2'-hydroxy corresponding base
  modified_base (12)..(12): 2'-hydroxy corresponding base
  modified_base (13)..(13): 2'-hydroxy corresponding base
  modified_base (14)..(14): 2'-hydroxy corresponding base
  modified_base (15)..(15): 2'-hydroxy corresponding base
  modified_base (16)..(16): 2'-hydroxy corresponding base
  modified_base (17)..(17): 2'-hydroxy corresponding base
  modified_base (18)..(18): 2'-hydroxy corresponding base
  modified_base (19)..(19): 2'-hydroxy corresponding base
  modified_base (20)..(20): deoxythymidine
  modified_base (21)..(21): 5'-thio thymidine
uuccgaauaaacuccaggctt

SEQ ID NO: 1351 - RNA, 19 nt, Artificial Sequence
  Description of Artificial Sequence: Synthetic oligonucleotide
  siRNAs to PCSK9
  modified_base (1)..(1): 2'-hydroxy corresponding base
  modified_base (2)..(2): 2'-O-methyl corresponding base
  modified_base (3)..(3): 2'-hydroxy corresponding base
  modified_base (4)..(4): 2'-O-methyl corresponding base
  modified_base (5)..(5): 2'-hydroxy corresponding base
  modified_base (6)..(6): 2'-O-methyl corresponding base
  modified_base (7)..(7): 2'-hydroxy corresponding base
  modified_base (8)..(8): 2'-O-methyl corresponding base
  modified_base (9)..(9): 2'-hydroxy corresponding base
  modified_base (10)..(10): 2'-O-methyl corresponding base
  modified_base (11)..(11): 2'-hydroxy corresponding base
  modified_base (12)..(12): 2'-O-methyl corresponding base
  modified_base (13)..(13): 2'-hydroxy corresponding base
  modified_base (14)..(14): 2'-O-methyl corresponding base
  modified_base (15)..(15): 2'-hydroxy corresponding base
  modified_base (16)..(16): 2'-O-methyl corresponding base
  modified_base (17)..(17): 2'-hydroxy corresponding base
  modified_base (18)..(18): 2'-O-methyl corresponding base
  modified_base (19)..(19): 2'-hydroxy corresponding base
gccuggaguuuauucggaa

SEQ ID NO: 1352 - DNA, 21 bp, Artificial Sequence
  Description of Artificial Sequence: Synthetic oligonucleotide
  Description of Combined DNA/RNA Molecule: Synthetic oligonucleotide
  siRNAs to PCSK9
  modified_base (1)..(1): 2'-hydroxy corresponding base
  modified_base (2)..(2): 2'-hydroxy corresponding base
  modified_base (3)..(3): 2'-hydroxy corresponding base
  modified_base (4)..(4): 2'-hydroxy corresponding base
  modified_base (5)..(5): 2'-hydroxy corresponding base
  modified_base (6)..(6): 2'-hydroxy corresponding base
  modified_base (7)..(7): 2'-hydroxy corresponding base
  modified_base (8)..(8): 2'-O-methyl corresponding base
  modified_base (9)..(9): 2'-hydroxy corresponding base
  modified_base (10)..(10): 2'-hydroxy corresponding base
  modified_base (11)..(11): 2'-hydroxy corresponding base
  modified_base (12)..(12): 2'-hydroxy corresponding base
  modified_base (13)..(13): 2'-hydroxy corresponding base
  modified_base (14)..(14): 2'-hydroxy corresponding base
  modified_base (15)..(15): 2'-O-methyl corresponding base
  modified_base (16)..(16): 2'-hydroxy corresponding base
  modified_base (17)..(17): 2'-hydroxy corresponding base
  modified_base (18)..(18): 2'-hydroxy corresponding base
  modified_base (19)..(19): 2'-hydroxy corresponding base
  modified_base (20)..(20): deoxythymidine
  modified_base (21)..(21): 5'-thio thymidine
uuccgaauaaacuccaggctt

SEQ ID NO: 1353 - RNA, 19 nt, Artificial Sequence
  Description of Artificial Sequence: Synthetic oligonucleotide
  siRNAs to PCSK9
  modified_base (1)..(1): 2'-hydroxy corresponding base
  modified_base (2)..(2): 2'-O-methyl corresponding base
  modified_base (3)..(3): 2'-hydroxy corresponding base
  modified_base (4)..(4): 2'-O-methyl corresponding base
  modified_base (5)..(5): 2'-hydroxy corresponding base
  modified_base (6)..(6): 2'-O-methyl corresponding base
  modified_base (7)..(7): 2'-hydroxy corresponding base
  modified_base (8)..(8): 2'-O-methyl corresponding base
  modified_base (9)..(9): 2'-hydroxy corresponding base
  modified_base (10)..(10): 2'-O-methyl corresponding base
  modified_base (11)..(11): 2'-hydroxy corresponding base
  modified_base (12)..(12): 2'-O-methyl corresponding base
  modified_base (13)..(13): 2'-hydroxy corresponding base
  modified_base (14)..(14): 2'-O-methyl corresponding base
  modified_base (15)..(15): 2'-hydroxy corresponding base
  modified_base (16)..(16): 2'-O-methyl corresponding base
  modified_base (17)..(17): 2'-hydroxy corresponding base
  modified_base (18)..(18): 2'-O-methyl corresponding base
  modified_base (19)..(19): 2'-hydroxy corresponding base
gccuggaguuuauucggaa

SEQ ID NO: 1354 - DNA, 21 bp, Artificial Sequence
  Description of Artificial Sequence: Synthetic oligonucleotide
  Description of Combined DNA/RNA Molecule: Synthetic oligonucleotide
  siRNAs to PCSK9
  modified_base (1)..(1): 2'-O-methyl corresponding base
  modified_base (2)..(2): 2'-hydroxy corresponding base
  modified_base (3)..(3): 2'-O-methyl corresponding base
  modified_base (4)..(4): 2'-hydroxy corresponding base
  modified_base (5)..(5): 2'-hydroxy corresponding base
  modified_base (6)..(6): 2'-hydroxy corresponding base
  modified_base (7)..(7): 2'-hydroxy corresponding base
  modified_base (8)..(8): 2'-O-methyl corresponding base
  modified_base (9)..(9): 2'-hydroxy corresponding base
  modified_base (10)..(10): 2'-hydroxy corresponding base
  modified_base (11)..(11): 2'-hydroxy corresponding base
  modified_base (12)..(12): 2'-hydroxy corresponding base
  modified_base (13)..(13): 2'-hydroxy corresponding base
  modified_base (14)..(14): 2'-O-methyl corresponding base
  modified_base (15)..(15): 2'-O-methyl corresponding base
  modified_base (16)..(16): 2'-hydroxy corresponding base
  modified_base (17)..(17): 2'-hydroxy corresponding base
  modified_base (18)..(18): 2'-hydroxy corresponding base
  modified_base (19)..(19): 2'-hydroxy corresponding base
  modified_base (20)..(20): deoxythymidine
  modified_base (21)..(21): 5'-thio thymidine
uuccgaauaaacuccaggctt

SEQ ID NO: 1355 - RNA, 19 nt, Artificial Sequence
  Description of Artificial Sequence: Synthetic oligonucleotide
  siRNAs to PCSK9
  modified_base (1)..(1): 2'-hydroxy corresponding base
  modified_base (2)..(2): 2'-O-methyl corresponding base
  modified_base (3)..(3): 2'-hydroxy corresponding base
  modified_base (4)..(4): 2'-O-methyl corresponding base
  modified_base (5)..(5): 2'-hydroxy corresponding base
  modified_base (6)..(6): 2'-O-methyl corresponding base
  modified_base (7)..(7): 2'-hydroxy corresponding base
  modified_base (8)..(8): 2'-O-methyl corresponding base
  modified_base (9)..(9): 2'-hydroxy corresponding base
  modified_base (10)..(10): 2'-O-methyl corresponding base
  modified_base (11)..(11): 2'-hydroxy corresponding base
  modified_base (12)..(12): 2'-O-methyl corresponding base
  modified_base (13)..(13): 2'-hydroxy corresponding base
  modified_base (14)..(14): 2'-O-methyl corresponding base
  modified_base (15)..(15): 2'-hydroxy corresponding base
  modified_base (16)..(16): 2'-O-methyl corresponding base
  modified_base (17)..(17): 2'-hydroxy corresponding base
  modified_base (18)..(18): 2'-O-methyl corresponding base
  modified_base (19)..(19): 2'-hydroxy corresponding base
gccuggaguuuauucggaa

SEQ ID NO: 1356 - RNA, 19 nt, Artificial Sequence
  Description of Artificial Sequence: Synthetic oligonucleotide
  siRNAs to PCSK9
  modified_base (1)..(1): 2'-hydroxy corresponding base
  modified_base (2)..(2): 2'-hydroxy corresponding base
  modified_base (3)..(3): 2'-hydroxy corresponding base
  modified_base (4)..(4): 2'-hydroxy corresponding base
  modified_base (5)..(5): 2'-hydroxy corresponding base
  modified_base (6)..(6): 2'-O-methyl corresponding base
  modified_base (7)..(7): 2'-O-methyl corresponding base
  modified_base (8)..(8): 2'-hydroxy corresponding base
  modified_base (9)..(9): 2'-hydroxy corresponding base
  modified_base (10)..(10): 2'-O-methyl corresponding base
  modified_base (11)..(11): 2'-O-methyl corresponding base
  modified_base (12)..(12): 2'-hydroxy corresponding base
  modified_base (13)..(13): 2'-hydroxy corresponding base
  modified_base (14)..(14): 2'-hydroxy corresponding base
  modified_base (15)..(15): 2'-hydroxy corresponding base
  modified_base (16)..(16): 2'-hydroxy corresponding base
  modified_base (17)..(17): 2'-O-methyl corresponding base
  modified_base (18)..(18): 2'-O-methyl corresponding base
  modified_base (19)..(19): 2'-O-methyl corresponding base
uuccgaauaaacuccaggc

SEQ ID NO: 1357 - DNA, 21 bp, Artificial Sequence
  Description of Artificial Sequence: Synthetic oligonucleotide
  Description of Combined DNA/RNA Molecule: Synthetic oligonucleotide
  siRNAs to PCSK9
  modified_base (1)..(1): 2'-hydroxy corresponding base
  modified_base (2)..(2): 2'-O-methyl corresponding base
  modified_base (3)..(3): 2'-hydroxy corresponding base
  modified_base (4)..(4): 2'-O-methyl corresponding base
  modified_base (5)..(5): 2'-hydroxy corresponding base
  modified_base (6)..(6): 2'-O-methyl corresponding base
  modified_base (7)..(7): 2'-hydroxy corresponding base
  modified_base (8)..(8): 2'-O-methyl corresponding base
  modified_base (9)..(9): 2'-hydroxy corresponding base
  modified_base (10)..(10): 2'-O-methyl corresponding base
  modified_base (11)..(11): 2'-hydroxy corresponding base
  modified_base (12)..(12): 2'-O-methyl corresponding base
  modified_base (13)..(13): 2'-hydroxy corresponding base
  modified_base (14)..(14): 2'-O-methyl corresponding base
  modified_base (15)..(15): 2'-hydroxy corresponding base
  modified_base (16)..(16): 2'-O-methyl corresponding base
  modified_base (17)..(17): 2'-hydroxy corresponding base
  modified_base (18)..(18): 2'-O-methyl corresponding base
  modified_base (19)..(19): 2'-hydroxy corresponding base
  modified_base (20)..(20): deoxythymidine
  modified_base (21)..(21): 5'-thio thymidine
gccuggaguuuauucggaatt

SEQ ID NO: 1358 - DNA, 21 bp, Artificial Sequence
  Description of Artificial Sequence: Synthetic oligonucleotide
  Description of Combined DNA/RNA Molecule: Synthetic oligonucleotide
  siRNAs to PCSK9
  modified_base (1)..(1): 2'-hydroxy corresponding base
  modified_base (2)..(2): 2'-hydroxy corresponding base
  modified_base (3)..(3): 2'-hydroxy corresponding base
  modified_base (4)..(4): 2'-hydroxy corresponding base
  modified_base (5)..(5): 2'-hydroxy corresponding base
  modified_base (6)..(6): 2'-O-methyl corresponding base
  modified_base (7)..(7): 2'-O-methyl corresponding base
  modified_base (8)..(8): 2'-hydroxy corresponding base
  modified_base (9)..(9): 2'-hydroxy corresponding base
  modified_base (10)..(10): 2'-O-methyl corresponding base
  modified_base (11)..(11): 2'-O-methyl corresponding base
  modified_base (12)..(12): 2'-hydroxy corresponding base
  modified_base (13)..(13): 2'-hydroxy corresponding base
  modified_base (14)..(14): 2'-hydroxy corresponding base
  modified_base (15)..(15): 2'-hydroxy corresponding base
  modified_base (16)..(16): 2'-hydroxy corresponding base
  modified_base (17)..(17): 2'-O-methyl corresponding base
  modified_base (18)..(18): 2'-O-methyl corresponding base
  modified_base (19)..(19): 2'-O-methyl corresponding base
  modified_base (20)..(20): deoxythymidine
  modified_base (21)..(21): 5'-thio thymidine
uuccgaauaaacuccaggctt

SEQ ID NO: 1359 - DNA, 22 bp, Artificial Sequence
  Description of Artificial Sequence: Synthetic oligonucleotide
  Description of Combined DNA/RNA Molecule: Synthetic oligonucleotide
  siRNAs to PCSK9
  modified_base (1)..(1): 2'-hydroxy corresponding base
  modified_base (2)..(2): 2'-O-methyl corresponding base
  modified_base (3)..(3): 2'-hydroxy corresponding base
  modified_base (4)..(4): 2'-O-methyl corresponding base
  modified_base (5)..(5): 2'-hydroxy corresponding base
  modified_base (6)..(6): 2'-O-methyl corresponding base
  modified_base (7)..(7): 2'-hydroxy corresponding base
  modified_base (8)..(8): 2'-O-methyl corresponding base
  modified_base (9)..(9): 2'-hydroxy corresponding base
  modified_base (10)..(10): 2'-O-methyl corresponding base
  modified_base (11)..(11): 2'-hydroxy corresponding base
  modified_base (12)..(12): 2'-O-methyl corresponding base
  modified_base (13)..(13): 2'-hydroxy corresponding base
  modified_base (14)..(14): 2'-O-methyl corresponding base
  modified_base (15)..(15): 2'-hydroxy corresponding base
  modified_base (16)..(16): 2'-O-methyl corresponding base
  modified_base (17)..(17): 2'-hydroxy corresponding base
  modified_base (18)..(18): 2'-O-methyl corresponding base
  modified_base (19)..(19): 2'-hydroxy corresponding base
  modified_base (20)..(20): deoxythymidine
  modified_base (21)..(21): deoxythymidine
  modified_base (22)..(22): abasic nucleotide
gccuggaguuuauucggaattn

SEQ ID NO: 1360 - DNA, 22 bp, Artificial Sequence
  Description of Artificial Sequence: Synthetic oligonucleotide
  Description of Combined DNA/RNA Molecule: Synthetic oligonucleotide
  siRNAs to PCSK9
  modified_base (1)..(1): 2'-hydroxy corresponding base
  modified_base (2)..(2): 2'-hydroxy corresponding base
  modified_base (3)..(3): 2'-hydroxy corresponding base
  modified_base (4)..(4): 2'-hydroxy corresponding base
  modified_base (5)..(5): 2'-hydroxy corresponding base
  modified_base (6)..(6): 2'-O-methyl corresponding base
  modified_base (7)..(7): 2'-O-methyl corresponding base
  modified_base (8)..(8): 2'-hydroxy corresponding base
  modified_base (9)..(9): 2'-hydroxy corresponding base
  modified_base (10)..(10): 2'-O-methyl corresponding base
  modified_base (11)..(11): 2'-O-methyl corresponding base
  modified_base (12)..(12): 2'-hydroxy corresponding base
  modified_base (13)..(13): 2'-hydroxy corresponding base
  modified_base (14)..(14): 2'-hydroxy corresponding base
  modified_base (15)..(15): 2'-hydroxy corresponding base
  modified_base (16)..(16): 2'-hydroxy corresponding base
  modified_base (17)..(17): 2'-O-methyl corresponding base
  modified_base (18)..(18): 2'-O-methyl corresponding base
  modified_base (19)..(19): 2'-O-methyl corresponding base
  modified_base (20)..(20): deoxythymidine
  modified_base (21)..(21): deoxythymidine
  modified_base (22)..(22): abasic nucleotide
uuccgaauaaacuccaggcttn

SEQ ID NO: 1361 - RNA, 19 nt, Artificial Sequence
  Description of Artificial Sequence: Synthetic oligonucleotide
  siRNAs to PCSK9
  modified_base (1)..(1): 2'-hydroxy corresponding base
  modified_base (2)..(2): 2'-O-methyl corresponding base
  modified_base (3)..(3): 2'-hydroxy corresponding base
  modified_base (4)..(4): 2'-O-methyl corresponding base
  modified_base (5)..(5): 2'-hydroxy corresponding base
  modified_base (6)..(6): 2'-O-methyl corresponding base
  modified_base (7)..(7): 2'-hydroxy corresponding base
  modified_base (8)..(8): 2'-O-methyl corresponding base
  modified_base (9)..(9): 2'-hydroxy corresponding base
  modified_base (10)..(10): 2'-O-methyl corresponding base
  modified_base (11)..(11): 2'-hydroxy corresponding base
  modified_base (12)..(12): 2'-O-methyl corresponding base
  modified_base (13)..(13): 2'-hydroxy corresponding base
  modified_base (14)..(14): 2'-O-methyl corresponding base
  modified_base (15)..(15): 2'-hydroxy corresponding base
  modified_base (16)..(16): 2'-O-methyl corresponding base
  modified_base (17)..(17): 2'-hydroxy corresponding base
  modified_base (18)..(18): 2'-O-methyl corresponding base
  modified_base (19)..(19): 2'-hydroxy corresponding base
gccuggaguuuauucggaa

SEQ ID NO: 1362 - RNA, 21 nt, Artificial Sequence
  Description of Artificial Sequence: Synthetic oligonucleotide
  siRNAs to PCSK9
  modified_base (1)..(1): 2'-hydroxy corresponding base
  modified_base (2)..(2): 2'-hydroxy corresponding base
  modified_base (3)..(3): 2'-hydroxy corresponding base
  modified_base (4)..(4): 2'-hydroxy corresponding base
  modified_base (5)..(5): 2'-hydroxy corresponding base
  modified_base (6)..(6): 2'-O-methyl corresponding base
  modified_base (7)..(7): 2'-O-methyl corresponding base
  modified_base (8)..(8): 2'-hydroxy corresponding base
  modified_base (9)..(9): 2'-hydroxy corresponding base
  modified_base (10)..(10): 2'-O-methyl corresponding base
  modified_base (11)..(11): 2'-O-methyl corresponding base
  modified_base (12)..(12): 2'-hydroxy corresponding base
  modified_base (13)..(13): 2'-hydroxy corresponding base
  modified_base (14)..(14): 2'-hydroxy corresponding base
  modified_base (15)..(15): 2'-hydroxy corresponding base
  modified_base (16)..(16): 2'-hydroxy corresponding base
  modified_base (17)..(17): 2'-O-methyl corresponding base
  modified_base (18)..(18): 2'-O-methyl corresponding base
  modified_base (19)..(19): 2'-O-methyl corresponding base
  modified_base (20)..(20): 2'-O-methyl corresponding base 5'-monophosphorothioate
  modified_base (21)..(21): 2'-O-methyl corresponding base 5'-monophosphorothioate
uuccgaauaaacuccaggccu

SEQ ID NO: 1363 - DNA, 21 bp, Artificial Sequence
  Description of Artificial Sequence: Synthetic oligonucleotide
  Description of Combined DNA/RNA Molecule: Synthetic oligonucleotide
  siRNAs to PCSK9
  modified_base (1)..(1): 2'-hydroxy corresponding base
  modified_base (2)..(2): 2'-O-methyl corresponding base
  modified_base (3)..(3): 2'-hydroxy corresponding base
  modified_base (4)..(4): 2'-O-methyl corresponding base
  modified_base (5)..(5): 2'-hydroxy corresponding base
  modified_base (6)..(6): 2'-O-methyl corresponding base
  modified_base (7)..(7): 2'-hydroxy corresponding base
  modified_base (8)..(8): 2'-O-methyl corresponding base
  modified_base (9)..(9): 2'-hydroxy corresponding base
  modified_base (10)..(10): 2'-O-methyl corresponding base
  modified_base (11)..(11): 2'-hydroxy corresponding base
  modified_base (12)..(12): 2'-O-methyl corresponding base
  modified_base (13)..(13): 2'-hydroxy corresponding base
  modified_base (14)..(14): 2'-O-methyl corresponding base
  modified_base (15)..(15): 2'-hydroxy corresponding base
  modified_base (16)..(16): 2'-O-methyl corresponding base
  modified_base (17)..(17): 2'-hydroxy corresponding base
  modified_base (18)..(18): 2'-O-methyl corresponding base
  modified_base (19)..(19): 2'-hydroxy corresponding base
  modified_base (20)..(20): deoxythymidine
  modified_base (21)..(21): 5'-thio thymidine
gccuggaguuuauucggaatt

SEQ ID NO: 1364 - DNA, 21 bp, Artificial Sequence
  Description of Artificial Sequence: Synthetic oligonucleotide
  Description of Combined DNA/RNA Molecule: Synthetic oligonucleotide
  siRNAs to PCSK9
  modified_base (1)..(1): 2'-hydroxy corresponding base
  modified_base (2)..(2): 2'-hydroxy corresponding base
  modified_base (3)..(3): 2'-hydroxy corresponding base
  modified_base (4)..(4): 2'-hydroxy corresponding base
  modified_base (5)..(5): 2'-hydroxy corresponding base
  modified_base (6)..(6): 2'-hydroxy corresponding base
  modified_base (7)..(7): 2'-hydroxy corresponding base
  modified_base (8)..(8): 2'-O-methyl corresponding base
  modified_base (9)..(9): 2'-hydroxy corresponding base
  modified_base (10)..(10): 2'-hydroxy corresponding base
  modified_base (11)..(11): 2'-hydroxy corresponding base
  modified_base (12)..(12): 2'-hydroxy corresponding base
  modified_base (13)..(13): 2'-hydroxy corresponding base
  modified_base (14)..(14): 2'-hydroxy corresponding base
  modified_base (15)..(15): 2'-O-methyl corresponding base
  modified_base (16)..(16): 2'-hydroxy corresponding base
  modified_base (17)..(17): 2'-hydroxy corresponding base
  modified_base (18)..(18): 2'-hydroxy corresponding base
  modified_base (19)..(19): 2'-hydroxy corresponding base
  modified_base (20)..(20): deoxythymidine
  modified_base (21)..(21): 5'-thio thymidine
uuccgaauaaacuccaggctt

SEQ ID NO: 1365 - DNA, 22 bp, Artificial Sequence
  Description of Artificial Sequence: Synthetic oligonucleotide
  Description of Combined DNA/RNA Molecule: Synthetic oligonucleotide
  siRNAs to PCSK9
  modified_base (1)..(1): 2'-hydroxy corresponding base
  modified_base (2)..(2): 2'-O-methyl corresponding base
  modified_base (3)..(3): 2'-hydroxy corresponding base
  modified_base (4)..(4): 2'-O-methyl corresponding base
  modified_base (5)..(5): 2'-hydroxy corresponding base
  modified_base (6)..(6): 2'-O-methyl corresponding base
  modified_base (7)..(7): 2'-hydroxy corresponding base
  modified_base (8)..(8): 2'-O-methyl corresponding base
  modified_base (9)..(9): 2'-hydroxy corresponding base
  modified_base (10)..(10): 2'-O-methyl corresponding base
  modified_base (11)..(11): 2'-hydroxy corresponding base
  modified_base (12)..(12): 2'-O-methyl corresponding base
  modified_base (13)..(13): 2'-hydroxy corresponding base
  modified_base (14)..(14): 2'-O-methyl corresponding base
  modified_base (15)..(15): 2'-hydroxy corresponding base
  modified_base (16)..(16): 2'-O-methyl corresponding base
  modified_base (17)..(17): 2'-hydroxy corresponding base
  modified_base (18)..(18): 2'-O-methyl corresponding base
  modified_base (19)..(19): 2'-hydroxy corresponding base
  modified_base (20)..(20): deoxythymidine
  modified_base (21)..(21): deoxythymidine
  modified_base (22)..(22): abasic nucleotide
gccuggaguuuauucggaattn

SEQ ID NO: 1366 - DNA, 22 bp, Artificial Sequence
  Description of Artificial Sequence: Synthetic oligonucleotide
  Description of Combined DNA/RNA Molecule: Synthetic oligonucleotide
  siRNAs to PCSK9
  modified_base (1)..(1): 2'-hydroxy corresponding base
  modified_base (2)..(2): 2'-hydroxy corresponding base
  modified_base (3)..(3): 2'-hydroxy corresponding base
  modified_base (4)..(4): 2'-hydroxy corresponding base
  modified_base (5)..(5): 2'-hydroxy corresponding base
  modified_base (6)..(6): 2'-hydroxy corresponding base
  modified_base (7)..(7): 2'-hydroxy corresponding base
  modified_base (8)..(8): 2'-O-methyl corresponding base
  modified_base (9)..(9): 2'-hydroxy corresponding base
  modified_base (10)..(10): 2'-hydroxy corresponding base
  modified_base (11)..(11): 2'-hydroxy corresponding base
  modified_base (12)..(12): 2'-hydroxy corresponding base
  modified_base (13)..(13): 2'-hydroxy corresponding base
  modified_base (14)..(14): 2'-hydroxy corresponding base
  modified_base (15)..(15): 2'-O-methyl corresponding base
  modified_base (16)..(16): 2'-hydroxy corresponding base
  modified_base (17)..(17): 2'-hydroxy corresponding base
  modified_base (18)..(18): 2'-hydroxy corresponding base
  modified_base (19)..(19): 2'-hydroxy corresponding base
  modified_base (20)..(20): deoxythymidine
  modified_base (21)..(21): deoxythymidine
  modified_base (22)..(22): abasic nucleotide
uuccgaauaaacuccaggcttn

SEQ ID NO: 1367 - RNA, 19 nt, Artificial Sequence
  Description of Artificial Sequence: Synthetic oligonucleotide
  siRNAs to PCSK9
  modified_base (1)..(1): 2'-hydroxy corresponding base
  modified_base (2)..(2): 2'-O-methyl corresponding base
  modified_base (3)..(3): 2'-hydroxy corresponding base
  modified_base (4)..(4): 2'-O-methyl corresponding base
  modified_base (5)..(5): 2'-hydroxy corresponding base
  modified_base (6)..(6): 2'-O-methyl corresponding base
  modified_base (7)..(7): 2'-hydroxy corresponding base
  modified_base (8)..(8): 2'-O-methyl corresponding base
  modified_base (9)..(9): 2'-hydroxy corresponding base
  modified_base (10)..(10): 2'-O-methyl corresponding base
  modified_base (11)..(11): 2'-hydroxy corresponding base
  modified_base (12)..(12): 2'-O-methyl corresponding base
  modified_base (13)..(13): 2'-hydroxy corresponding base
  modified_base (14)..(14): 2'-O-methyl corresponding base
  modified_base (15)..(15): 2'-hydroxy corresponding base
  modified_base (16)..(16): 2'-O-methyl corresponding base
  modified_base (17)..(17): 2'-hydroxy corresponding base
  modified_base (18)..(18): 2'-O-methyl corresponding base
  modified_base (19)..(19): 2'-hydroxy corresponding base
gccuggaguuuauucggaa

SEQ ID NO: 1368 - RNA, 21 nt, Artificial Sequence
  Description of Artificial Sequence: Synthetic oligonucleotide
  siRNAs to PCSK9
  modified_base (1)..(1): 2'-hydroxy corresponding base
  modified_base (2)..(2): 2'-hydroxy corresponding base
  modified_base (3)..(3): 2'-hydroxy corresponding base
  modified_base (4)..(4): 2'-hydroxy corresponding base
  modified_base (5)..(5): 2'-hydroxy corresponding base
  modified_base (6)..(6): 2'-hydroxy corresponding base
  modified_base (7)..(7): 2'-hydroxy corresponding base
  modified_base (8)..(8): 2'-O-methyl corresponding base
  modified_base (9)..(9): 2'-hydroxy corresponding base
  modified_base (10)..(10): 2'-hydroxy corresponding base
  modified_base (11)..(11): 2'-hydroxy corresponding base
  modified_base (12)..(12): 2'-hydroxy corresponding base
  modified_base (13)..(13): 2'-hydroxy corresponding base
  modified_base (14)..(14): 2'-hydroxy corresponding base
  modified_base (15)..(15): 2'-O-methyl corresponding base
  modified_base (16)..(16): 2'-hydroxy corresponding base
  modified_base (17)..(17): 2'-hydroxy corresponding base
  modified_base (18)..(18): 2'-hydroxy corresponding base
  modified_base (19)..(19): 2'-hydroxy corresponding base
  modified_base (20)..(20): 2'-O-methyl corresponding base 5'-monophosphorothioate
  modified_base (21)..(21): 2'-O-methyl corresponding base 5'-monophosphorothioate
uuccgaauaaacuccaggccu

SEQ ID NO: 1369 - DNA, 21 bp, Artificial Sequence
  Description of Artificial Sequence: Synthetic oligonucleotide
  Description of Combined DNA/RNA Molecule: Synthetic oligonucleotide
  siRNAs to PCSK9
  modified_base (1)..(1): 2'-hydroxy corresponding base
  modified_base (2)..(2): 2'-O-methyl corresponding base
  modified_base (3)..(3): 2'-hydroxy corresponding base
  modified_base (4)..(4): 2'-O-methyl corresponding base
  modified_base (5)..(5): 2'-hydroxy corresponding base
  modified_base (6)..(6): 2'-O-methyl corresponding base
  modified_base (7)..(7): 2'-hydroxy corresponding base
  modified_base (8)..(8): 2'-O-methyl corresponding base
  modified_base (9)..(9): 2'-hydroxy corresponding base
  modified_base (10)..(10): 2'-O-methyl corresponding base
  modified_base (11)..(11): 2'-hydroxy corresponding base
  modified_base (12)..(12): 2'-O-methyl corresponding base
  modified_base (13)..(13): 2'-hydroxy corresponding base
  modified_base (14)..(14): 2'-O-methyl corresponding base
  modified_base (15)..(15): 2'-hydroxy corresponding base
  modified_base (16)..(16): 2'-O-methyl corresponding base
  modified_base (17)..(17): 2'-hydroxy corresponding base
  modified_base (18)..(18): 2'-O-methyl corresponding base
  modified_base (19)..(19): 2'-hydroxy corresponding base
  modified_base (20)..(20): deoxythymidine
  modified_base (21)..(21): 5'-thio thymidine
gccuggaguuuauucggaatt

SEQ ID NO: 1370 - DNA, 21 bp, Artificial Sequence
  Description of Artificial Sequence: Synthetic oligonucleotide
  Description of Combined DNA/RNA Molecule: Synthetic oligonucleotide
  siRNAs to PCSK9
  modified_base (1)..(1): 2'-hydroxy corresponding base
  modified_base (2)..(2): 2'-hydroxy corresponding base
  modified_base (3)..(3): 2'-hydroxy corresponding base
  modified_base (4)..(4): 2'-hydroxy corresponding base
  modified_base (5)..(5): 2'-hydroxy corresponding base
  modified_base (6)..(6): 2'-hydroxy corresponding base
  modified_base (7)..(7): 2'-hydroxy corresponding base
  modified_base (8)..(8): 2'-hydroxy corresponding base
  modified_base (9)..(9): 2'-hydroxy corresponding base
  modified_base (10)..(10): 2'-hydroxy corresponding base
  modified_base (11)..(11): 2'-hydroxy corresponding base
  modified_base (12)..(12): 2'-hydroxy corresponding base
  modified_base (13)..(13): 2'-hydroxy corresponding base
  modified_base (14)..(14): 2'-hydroxy corresponding base
  modified_base (15)..(15): 2'-hydroxy corresponding base
  modified_base (16)..(16): 2'-hydroxy corresponding base
  modified_base (17)..(17): 2'-hydroxy corresponding base
  modified_base (18)..(18): 2'-hydroxy corresponding base
  modified_base (19)..(19): 2'-hydroxy corresponding base
  modified_base (20)..(20): deoxythymidine
  modified_base (21)..(21): 5'-thio thymidine
uuccgaauaaacuccaggctt

SEQ ID NO: 1371 - DNA, 22 bp, Artificial Sequence
  Description of Artificial Sequence: Synthetic oligonucleotide
  Description of Combined DNA/RNA Molecule: Synthetic oligonucleotide
  siRNAs to PCSK9
  modified_base (1)..(1): 2'-hydroxy corresponding base
  modified_base (2)..(2): 2'-O-methyl corresponding base
  modified_base (3)..(3): 2'-hydroxy corresponding base
  modified_base (4)..(4): 2'-O-methyl corresponding base
  modified_base (5)..(5): 2'-hydroxy corresponding base
  modified_base (6)..(6): 2'-O-methyl corresponding base
  modified_base (7)..(7): 2'-hydroxy corresponding base
  modified_base (8)..(8): 2'-O-methyl corresponding base
  modified_base (9)..(9): 2'-hydroxy corresponding base
  modified_base (10)..(10): 2'-O-methyl corresponding base
  modified_base (11)..(11): 2'-hydroxy corresponding base
  modified_base (12)..(12): 2'-O-methyl corresponding base
  modified_base (13)..(13): 2'-hydroxy corresponding base
  modified_base (14)..(14): 2'-O-methyl corresponding base
  modified_base (15)..(15): 2'-hydroxy corresponding base
  modified_base (16)..(16): 2'-O-methyl corresponding base
  modified_base (17)..(17): 2'-hydroxy corresponding base
  modified_base (18)..(18): 2'-O-methyl corresponding base
  modified_base (19)..(19): 2'-hydroxy corresponding base
  modified_base (20)..(20): deoxythymidine
  modified_base (21)..(21): deoxythymidine
  modified_base (22)..(22): abasic nucleotide
gccuggaguuuauucggaattn

SEQ ID NO: 1372 - DNA, 22 bp, Artificial Sequence
  Description of Artificial Sequence: Synthetic oligonucleotide
  Description of Combined DNA/RNA Molecule: Synthetic oligonucleotide
  siRNAs to PCSK9
  modified_base (1)..(1): 2'-hydroxy corresponding base
  modified_base (2)..(2): 2'-hydroxy corresponding base
  modified_base (3)..(3): 2'-hydroxy corresponding base
  modified_base (4)..(4): 2'-hydroxy corresponding base
  modified_base (5)..(5): 2'-hydroxy corresponding base
  modified_base (6)..(6): 2'-hydroxy corresponding base
  modified_base (7)..(7): 2'-hydroxy corresponding base
  modified_base (8)..(8): 2'-hydroxy corresponding base
  modified_base (9)..(9): 2'-hydroxy corresponding base
  modified_base (10)..(10): 2'-hydroxy corresponding base
  modified_base (11)..(11): 2'-hydroxy corresponding base
  modified_base (12)..(12): 2'-hydroxy corresponding base
  modified_base (13)..(13): 2'-hydroxy corresponding base
  modified_base (14)..(14): 2'-hydroxy corresponding base
  modified_base (15)..(15): 2'-hydroxy corresponding base
  modified_base (16)..(16): 2'-hydroxy corresponding base
  modified_base (17)..(17): 2'-hydroxy corresponding base
  modified_base (18)..(18): 2'-hydroxy corresponding base
  modified_base (19)..(19): 2'-hydroxy corresponding base
  modified_base (20)..(20): deoxythymidine
  modified_base (21)..(21): deoxythymidine
  modified_base (22)..(22): abasic nucleotide
uuccgaauaaacuccaggcttn

SEQ ID NO: 1373 - RNA, 19 nt, Artificial Sequence
  Description of Artificial Sequence: Synthetic oligonucleotide
  siRNAs to PCSK9
  modified_base (1)..(1): 2'-hydroxy corresponding base
  modified_base (2)..(2): 2'-O-methyl corresponding base
  modified_base (3)..(3): 2'-hydroxy corresponding base
  modified_base (4)..(4): 2'-O-methyl corresponding base
  modified_base (5)..(5): 2'-hydroxy corresponding base
  modified_base (6)..(6): 2'-O-methyl corresponding base
  modified_base (7)..(7): 2'-hydroxy corresponding base
  modified_base (8)..(8): 2'-O-methyl corresponding base
  modified_base (9)..(9): 2'-hydroxy corresponding base
  modified_base (10)..(10): 2'-O-methyl corresponding base
  modified_base (11)..(11): 2'-hydroxy corresponding base
  modified_base (12)..(12): 2'-O-methyl corresponding base
  modified_base (13)..(13): 2'-hydroxy corresponding base
  modified_base (14)..(14): 2'-O-methyl corresponding base
  modified_base (15)..(15): 2'-hydroxy corresponding base
  modified_base (16)..(16): 2'-O-methyl corresponding base
  modified_base (17)..(17): 2'-hydroxy corresponding base
  modified_base (18)..(18): 2'-O-methyl corresponding base
  modified_base (19)..(19): 2'-hydroxy corresponding base
gccuggaguuuauucggaa

SEQ ID NO: 1374 - RNA, 21 nt, Artificial Sequence
  Description of Artificial Sequence: Synthetic oligonucleotide
  siRNAs to PCSK9
  modified_base (1)..(1): 2'-hydroxy corresponding base
  modified_base (2)..(2): 2'-hydroxy corresponding base
  modified_base (3)..(3): 2'-hydroxy corresponding base
  modified_base (4)..(4): 2'-hydroxy corresponding base
  modified_base (5)..(5): 2'-hydroxy corresponding base
  modified_base (6)..(6): 2'-hydroxy corresponding base
  modified_base (7)..(7): 2'-hydroxy corresponding base
  modified_base (8)..(8): 2'-hydroxy corresponding base
  modified_base (9)..(9): 2'-hydroxy corresponding base
  modified_base (10)..(10): 2'-hydroxy corresponding base
  modified_base (11)..(11): 2'-hydroxy corresponding base
  modified_base (12)..(12): 2'-hydroxy corresponding base
  modified_base (13)..(13): 2'-hydroxy corresponding base
  modified_base (14)..(14): 2'-hydroxy corresponding base
  modified_base (15)..(15): 2'-hydroxy corresponding base
  modified_base (16)..(16): 2'-hydroxy corresponding base
  modified_base (17)..(17): 2'-hydroxy corresponding base
  modified_base (18)..(18): 2'-hydroxy corresponding base
  modified_base (19)..(19): 2'-hydroxy corresponding base
  modified_base (20)..(20): 2'-O-methyl corresponding base 5'-monophosphorothioate
  modified_base (21)..(21): 2'-O-methyl corresponding base 5'-monophosphorothioate
uuccgaauaaacuccaggccu

SEQ ID NO: 1375 - RNA, 19 nt, Artificial Sequence
  Description of Artificial Sequence: Synthetic oligonucleotide
  siRNAs to PCSK9
  modified_base (1)..(1): 2'-deoxy-2'-fluoro corresponding base
  modified_base (2)..(2): 2'-O-methyl corresponding base
  modified_base (3)..(3): 2'-deoxy-2'-fluoro corresponding base
  modified_base (4)..(4): 2'-O-methyl corresponding base
  modified_base (5)..(5): 2'-deoxy-2'-fluoro corresponding base
  modified_base (6)..(6): 2'-O-methyl corresponding base
  modified_base (7)..(7): 2'-deoxy-2'-fluoro corresponding base
  modified_base (8)..(8): 2'-O-methyl corresponding base
  modified_base (9)..(9): 2'-deoxy-2'-fluoro corresponding base
  modified_base (10)..(10): 2'-O-methyl corresponding base
  modified_base (11)..(11): 2'-deoxy-2'-fluoro corresponding base
  modified_base (12)..(12): 2'-O-methyl corresponding base
  modified_base (13)..(13): 2'-deoxy-2'-fluoro corresponding base
  modified_base (14)..(14): 2'-O-methyl corresponding base
  modified_base (15)..(15): 2'-deoxy-2'-fluoro corresponding base
  modified_base (16)..(16): 2'-O-methyl corresponding base
  modified_base (17)..(17): 2'-deoxy-2'-fluoro corresponding base
  modified_base (18)..(18): 2'-O-methyl corresponding base
  modified_base (19)..(19): 2'-deoxy-2'-fluoro corresponding base
gccuggaguuuauucggaa

SEQ ID NO: 1376 - RNA, 19 nt, Artificial Sequence
  Description of Artificial Sequence: Synthetic oligonucleotide
  siRNAs to PCSK9
  modified_base (1)..(1): 2'-O-methyl corresponding base
  modified_base (2)..(2): 2'-deoxy-2'-fluoro corresponding base
  modified_base (3)..(3): 2'-O-methyl corresponding base
  modified_base (4)..(4): 2'-deoxy-2'-fluoro corresponding base
  modified_base (5)..(5): 2'-O-methyl corresponding base
  modified_base (6)..(6): 2'-deoxy-2'-fluoro corresponding base
  modified_base (7)..(7): 2'-O-methyl corresponding base
  modified_base (8)..(8): 2'-deoxy-2'-fluoro corresponding base
  modified_base (9)..(9): 2'-O-methyl corresponding base
  modified_base (10)..(10): 2'-deoxy-2'-fluoro corresponding base
  modified_base (11)..(11): 2'-O-methyl corresponding base
  modified_base (12)..(12): 2'-deoxy-2'-fluoro corresponding base
  modified_base (13)..(13): 2'-O-methyl corresponding base
  modified_base (14)..(14): 2'-deoxy-2'-fluoro corresponding base
  modified_base (15)..(15): 2'-O-methyl corresponding base
  modified_base (16)..(16): 2'-deoxy-2'-fluoro corresponding base
  modified_base (17)..(17): 2'-O-methyl corresponding base
  modified_base (18)..(18): 2'-deoxy-2'-fluoro corresponding base
  modified_base (19)..(19): 2'-O-methyl corresponding base
uuccgaauaaacuccaggc

SEQ ID NO: 1377 - RNA, 19 nt, Artificial Sequence
  Description of Artificial Sequence: Synthetic oligonucleotide
  siRNAs to PCSK9
  modified_base (1)..(1): 2'-hydroxy corresponding base
  modified_base (2)..(2): 2'-O-methyl corresponding base
  modified_base (3)..(3): 2'-hydroxy corresponding base
  modified_base (4)..(4): 2'-O-methyl corresponding base
  modified_base (5)..(5): 2'-hydroxy corresponding base
  modified_base (6)..(6): 2'-O-methyl corresponding base
  modified_base (7)..(7): 2'-hydroxy corresponding base
  modified_base (8)..(8): 2'-O-methyl corresponding base
  modified_base (9)..(9): 2'-hydroxy corresponding base
  modified_base (10)..(10): 2'-O-methyl corresponding base
  modified_base (11)..(11): 2'-hydroxy corresponding base
  modified_base (12)..(12): 2'-O-methyl corresponding base
  modified_base (13)..(13): 2'-hydroxy corresponding base
  modified_base (14)..(14): 2'-O-methyl corresponding base
  modified_base (15)..(15): 2'-hydroxy corresponding base
  modified_base (16)..(16): 2'-O-methyl corresponding base
  modified_base (17)..(17): 2'-hydroxy corresponding base
  modified_base (18)..(18): 2'-O-methyl corresponding base
  modified_base (19)..(19): 2'-hydroxy corresponding base
gccuggaguuuauucggaa

SEQ ID NO: 1378 - RNA, 19 nt, Artificial Sequence
  Description of Artificial Sequence: Synthetic oligonucleotide
  siRNAs to PCSK9
  modified_base (1)..(1): 2'-O-methyl corresponding base
  modified_base (2)..(2): 2'-deoxy-2'-fluoro corresponding base
  modified_base (3)..(3): 2'-O-methyl corresponding base
  modified_base (4)..(4): 2'-deoxy-2'-fluoro corresponding base
  modified_base (5)..(5): 2'-O-methyl corresponding base
  modified_base (6)..(6): 2'-deoxy-2'-fluoro corresponding base
  modified_base (7)..(7): 2'-O-methyl corresponding base
  modified_base (8)..(8): 2'-deoxy-2'-fluoro corresponding base
  modified_base (9)..(9): 2'-O-methyl corresponding base
  modified_base (10)..(10): 2'-deoxy-2'-fluoro corresponding base
  modified_base (11)..(11): 2'-O-methyl corresponding base
  modified_base (12)..(12): 2'-deoxy-2'-fluoro corresponding base
  modified_base (13)..(13): 2'-O-methyl corresponding base
  modified_base (14)..(14): 2'-deoxy-2'-fluoro corresponding base
  modified_base (15)..(15): 2'-O-methyl corresponding base
  modified_base (16)..(16): 2'-deoxy-2'-fluoro corresponding base
  modified_base (17)..(17): 2'-O-methyl corresponding base
  modified_base (18)..(18): 2'-deoxy-2'-fluoro corresponding base
  modified_base (19)..(19): 2'-O-methyl corresponding base
uuccgaauaaacuccaggc

SEQ ID NO: 1379 - RNA, 19 nt, Artificial Sequence
  Description of Artificial Sequence: Synthetic oligonucleotide
  siRNAs to PCSK9
  modified_base (1)..(1): 2'-hydroxy corresponding base
  modified_base (2)..(2): 2'-O-methyl corresponding base
  modified_base (3)..(3): 2'-O-methyl corresponding base
  modified_base (4)..(4): 2'-O-methyl corresponding base
  modified_base (5)..(5): 2'-hydroxy corresponding base
  modified_base (6)..(6): 2'-hydroxy corresponding base
  modified_base (7)..(7): 2'-hydroxy corresponding base
  modified_base (8)..(8): 2'-hydroxy corresponding base
  modified_base (9)..(9): 2'-O-methyl corresponding base
  modified_base (10)..(10): 2'-O-methyl corresponding base
  modified_base (11)..(11): 2'-O-methyl corresponding base
  modified_base (12)..(12): 2'-hydroxy corresponding base
  modified_base (13)..(13): 2'-O-methyl corresponding base
  modified_base (14)..(14): 2'-O-methyl corresponding base
  modified_base (15)..(15): 2'-O-methyl corresponding base
  modified_base (16)..(16): 2'-hydroxy corresponding base
  modified_base (17)..(17): 2'-hydroxy corresponding base
  modified_base (18)..(18): 2'-hydroxy corresponding base
  modified_base (19)..(19): 2'-hydroxy corresponding base
gccuggaguuuauucggaa

SEQ ID NO: 1380 - RNA, 19 nt, Artificial Sequence
  Description of Artificial Sequence: Synthetic oligonucleotide
  siRNAs to PCSK9
  modified_base (1)..(1): 2'-O-methyl corresponding base
  modified_base (2)..(2): 2'-deoxy-2'-fluoro corresponding base
  modified_base (3)..(3): 2'-O-methyl corresponding base
  modified_base (4)..(4): 2'-deoxy-2'-fluoro corresponding base
  modified_base (5)..(5): 2'-O-methyl corresponding base
  modified_base (6)..(6): 2'-deoxy-2'-fluoro corresponding base
  modified_base (7)..(7): 2'-O-methyl corresponding base
  modified_base (8)..(8): 2'-deoxy-2'-fluoro corresponding base
  modified_base (9)..(9): 2'-O-methyl corresponding base
  modified_base (10)..(10): 2'-deoxy-2'-fluoro corresponding base
  modified_base (11)..(11): 2'-O-methyl corresponding base
  modified_base (12)..(12): 2'-deoxy-2'-fluoro corresponding base
  modified_base (13)..(13): 2'-O-methyl corresponding base
  modified_base (14)..(14): 2'-deoxy-2'-fluoro corresponding base
  modified_base (15)..(15): 2'-O-methyl corresponding base
  modified_base (16)..(16): 2'-deoxy-2'-fluoro corresponding base
  modified_base (17)..(17): 2'-O-methyl corresponding base
  modified_base (18)..(18): 2'-deoxy-2'-fluoro corresponding base
  modified_base (19)..(19): 2'-O-methyl corresponding base
uuccgaauaaacuccaggc

SEQ ID NO: 1381 - DNA, 21 bp, Artificial Sequence
  Description of Artificial Sequence: Synthetic oligonucleotide
  Description of Combined DNA/RNA Molecule: Synthetic oligonucleotide
  siRNAs to PCSK9
  modified_base (1)..(1): 2'-deoxy-2'-fluoro corresponding base
  modified_base (2)..(2): 2'-O-methyl corresponding base
  modified_base (3)..(3): 2'-deoxy-2'-fluoro corresponding base
  modified_base (4)..(4): 2'-O-methyl corresponding base
  modified_base (5)..(5): 2'-deoxy-2'-fluoro corresponding base
  modified_base (6)..(6): 2'-O-methyl corresponding base
  modified_base (7)..(7): 2'-deoxy-2'-fluoro corresponding base
  modified_base (8)..(8): 2'-O-methyl corresponding base
  modified_base (9)..(9): 2'-deoxy-2'-fluoro corresponding base
  modified_base (10)..(10): 2'-O-methyl corresponding base
  modified_base (11)..(11): 2'-deoxy-2'-fluoro corresponding base
  modified_base (12)..(12): 2'-O-methyl corresponding base
  modified_base (13)..(13): 2'-deoxy-2'-fluoro corresponding base
  modified_base (14)..(14): 2'-O-methyl corresponding base
  modified_base (15)..(15): 2'-deoxy-2'-fluoro corresponding base
  modified_base (16)..(16): 2'-O-methyl corresponding base
  modified_base (17)..(17): 2'-deoxy-2'-fluoro corresponding base
  modified_base (18)..(18): 2'-O-methyl corresponding base
  modified_base (19)..(19): 2'-deoxy-2'-fluoro corresponding base
  modified_base (20)..(20): deoxythymidine
  modified_base (21)..(21): 5'-thio thymidine
gccuggaguuuauucggaatt

SEQ ID NO: 1382 - DNA, 21 bp, Artificial Sequence
  Description of Artificial Sequence: Synthetic oligonucleotide
  Description of Combined DNA/RNA Molecule: Synthetic oligonucleotide
  siRNAs to PCSK9
  modified_base (1)..(1): 2'-O-methyl corresponding base
  modified_base (2)..(2): 2'-deoxy-2'-fluoro corresponding base
  modified_base (3)..(3): 2'-O-methyl corresponding base
  modified_base (4)..(4): 2'-deoxy-2'-fluoro corresponding base
  modified_base (5)..(5): 2'-O-methyl corresponding base
  modified_base (6)..(6): 2'-deoxy-2'-fluoro corresponding base
  modified_base (7)..(7): 2'-O-methyl corresponding base
  modified_base (8)..(8): 2'-deoxy-2'-fluoro corresponding base
  modified_base (9)..(9): 2'-O-methyl corresponding base
  modified_base (10)..(10): 2'-deoxy-2'-fluoro corresponding base
  modified_base (11)..(11): 2'-O-methyl corresponding base
  modified_base (12)..(12): 2'-deoxy-2'-fluoro corresponding base
  modified_base (13)..(13): 2'-O-methyl corresponding base
  modified_base (14)..(14): 2'-deoxy-2'-fluoro corresponding base
  modified_base (15)..(15): 2'-O-methyl corresponding base
  modified_base (16)..(16): 2'-deoxy-2'-fluoro corresponding base
  modified_base (17)..(17): 2'-O-methyl corresponding base
  modified_base (18)..(18): 2'-deoxy-2'-fluoro corresponding base
  modified_base (19)..(19): 2'-O-methyl corresponding base
  modified_base (20)..(20): deoxythymidine
  modified_base (21)..(21): 5'-thio thymidine
uuccgaauaaacuccaggctt

SEQ ID NO: 1383 - DNA, 21 bp, Artificial Sequence
  Description of Artificial Sequence: Synthetic oligonucleotide
  Description of Combined DNA/RNA Molecule: Synthetic oligonucleotide
  siRNAs to PCSK9
  modified_base (1)..(1): 2'-deoxy-2'-fluoro corresponding base
  modified_base (2)..(2): 2'-O-methyl corresponding base
  modified_base (3)..(3): 2'-deoxy-2'-fluoro corresponding base
  modified_base (4)..(4): 2'-O-methyl corresponding base
  modified_base (5)..(5): 2'-deoxy-2'-fluoro corresponding base
  modified_base (6)..(6): 2'-O-methyl corresponding base
  modified_base (7)..(7): 2'-deoxy-2'-fluoro corresponding base
  modified_base (8)..(8): 2'-O-methyl corresponding base
  modified_base (9)..(9): 2'-deoxy-2'-fluoro corresponding base
  modified_base (10)..(10): 2'-O-methyl corresponding base
  modified_base (11)..(11): 2'-deoxy-2'-fluoro corresponding base
  modified_base (12)..(12): 2'-O-methyl corresponding base
  modified_base (13)..(13): 2'-deoxy-2'-fluoro corresponding base
  modified_base (14)..(14): 2'-O-methyl corresponding base
  modified_base (15)..(15): 2'-deoxy-2'-fluoro corresponding base
  modified_base (16)..(16): 2'-O-methyl corresponding base
  modified_base (17)..(17): 2'-deoxy-2'-fluoro corresponding base
  modified_base (18)..(18): 2'-O-methyl corresponding base
  modified_base (19)..(19): 2'-deoxy-2'-fluoro corresponding base
  modified_base (20)..(20): deoxythymidine
  modified_base (21)..(21): 5'-thio thymidine
gccuggaguuuauucggaatt

SEQ ID NO: 1384 - DNA, 21 bp, Artificial Sequence
  Description of Artificial Sequence: Synthetic oligonucleotide
  Description of Combined DNA/RNA Molecule: Synthetic oligonucleotide
  siRNAs to PCSK9
  modified_base (1)..(1): 2'-hydroxy corresponding base
  modified_base (2)..(2): 2'-hydroxy corresponding base
  modified_base (3)..(3): 2'-hydroxy corresponding base
  modified_base (4)..(4): 2'-hydroxy corresponding base
  modified_base (5)..(5): 2'-hydroxy corresponding base
  modified_base (6)..(6): 2'-hydroxy corresponding base
  modified_base (7)..(7): 2'-hydroxy corresponding base
  modified_base (8)..(8): 2'-O-methyl corresponding base
  modified_base (9)..(9): 2'-hydroxy corresponding base
  modified_base (10)..(10): 2'-hydroxy corresponding base
  modified_base (11)..(11): 2'-hydroxy corresponding base
  modified_base (12)..(12): 2'-hydroxy corresponding base
  modified_base (13)..(13): 2'-hydroxy corresponding base
  modified_base (14)..(14): 2'-hydroxy corresponding base
  modified_base (15)..(15): 2'-O-methyl corresponding base
  modified_base (16)..(16): 2'-hydroxy corresponding base
  modified_base (17)..(17): 2'-hydroxy corresponding base
  modified_base (18)..(18): 2'-hydroxy corresponding base
  modified_base (19)..(19): 2'-hydroxy corresponding base
  modified_base (20)..(20): deoxythymidine
  modified_base (21)..(21): 5'-thio thymidine
uuccgaauaaacuccaggctt

SEQ ID NO: 1385 - DNA, 21 bp, Artificial Sequence
  Description of Artificial Sequence: Synthetic oligonucleotide
  Description of Combined DNA/RNA Molecule: Synthetic oligonucleotide
  siRNAs to PCSK9
  modified_base (1)..(1): 2'-deoxy-2'-fluoro corresponding base
  modified_base (2)..(2): 2'-O-methyl corresponding base
  modified_base (3)..(3): 2'-deoxy-2'-fluoro corresponding base
  modified_base (4)..(4): 2'-O-methyl corresponding base
  modified_base (5)..(5): 2'-deoxy-2'-fluoro corresponding base
  modified_base (6)..(6): 2'-O-methyl corresponding base
  modified_base (7)..(7): 2'-deoxy-2'-fluoro corresponding base
  modified_base (8)..(8): 2'-O-methyl corresponding base
  modified_base (9)..(9): 2'-deoxy-2'-fluoro corresponding base
  modified_base (10)..(10): 2'-O-methyl corresponding base
  modified_base (11)..(11): 2'-deoxy-2'-fluoro corresponding base
  modified_base (12)..(12): 2'-O-methyl corresponding base
  modified_base (13)..(13): 2'-deoxy-2'-fluoro corresponding base
  modified_base (14)..(14): 2'-O-methyl corresponding base
  modified_base (15)..(15): 2'-deoxy-2'-fluoro corresponding base
  modified_base (16)..(16): 2'-O-methyl corresponding base
  modified_base (17)..(17): 2'-deoxy-2'-fluoro corresponding base
  modified_base (18)..(18): 2'-O-methyl corresponding base
  modified_base (19)..(19): 2'-deoxy-2'-fluoro corresponding base
  modified_base (20)..(20): deoxythymidine
  modified_base (21)..(21): 5'-thio thymidine
gccuggaguuuauucggaatt

SEQ ID NO: 1386 - DNA, 21 bp, Artificial Sequence
  Description of Artificial Sequence: Synthetic oligonucleotide
  Description of Combined DNA/RNA Molecule: Synthetic oligonucleotide
  siRNAs to PCSK9
  modified_base (1)..(1): 2'-O-methyl corresponding base
  modified_base (2)..(2): 2'-hydroxy corresponding base
  modified_base (3)..(3): 2'-O-methyl corresponding base
  modified_base (4)..(4): 2'-hydroxy corresponding base
  modified_base (5)..(5): 2'-hydroxy corresponding base
  modified_base (6)..(6): 2'-hydroxy corresponding base
  modified_base (7)..(7): 2'-hydroxy corresponding base
  modified_base (8)..(8): 2'-O-methyl corresponding base
  modified_base (9)..(9): 2'-hydroxy corresponding base
  modified_base (10)..(10): 2'-hydroxy corresponding base
  modified_base (11)..(11): 2'-hydroxy corresponding base
  modified_base (12)..(12): 2'-hydroxy corresponding base
  modified_base (13)..(13): 2'-hydroxy corresponding base
  modified_base (14)..(14): 2'-O-methyl corresponding base
  modified_base (15)..(15): 2'-O-methyl corresponding base
  modified_base (16)..(16): 2'-hydroxy corresponding base
  modified_base (17)..(17): 2'-hydroxy corresponding base
  modified_base (18)..(18): 2'-hydroxy corresponding base
  modified_base (19)..(19): 2'-hydroxy corresponding base
  modified_base (20)..(20): deoxythymidine
  modified_base (21)..(21): 5'-thio thymidine
uuccgaauaaacuccaggctt

SEQ ID NO: 1387 - DNA, 21 bp, Artificial Sequence
  Description of Artificial Sequence: Synthetic oligonucleotide
  Description of Combined DNA/RNA Molecule: Synthetic oligonucleotide
  siRNAs to PCSK9
  modified_base (1)..(1): 2'-deoxy-2'-fluoro corresponding base
  modified_base (2)..(2): 2'-O-methyl corresponding base
  modified_base (3)..(3): 2'-deoxy-2'-fluoro corresponding base
  modified_base (4)..(4): 2'-O-methyl corresponding base
  modified_base (5)..(5): 2'-deoxy-2'-fluoro corresponding base
  modified_base (6)..(6): 2'-O-methyl corresponding base
  modified_base (7)..(7): 2'-deoxy-2'-fluoro corresponding base
  modified_base (8)..(8): 2'-O-methyl corresponding base
  modified_base (9)..(9): 2'-deoxy-2'-fluoro corresponding base
  modified_base (10)..(10): 2'-O-methyl corresponding base
  modified_base (11)..(11): 2'-deoxy-2'-fluoro corresponding base
  modified_base (12)..(12): 2'-O-methyl corresponding base
  modified_base (13)..(13): 2'-deoxy-2'-fluoro corresponding base
  modified_base (14)..(14): 2'-O-methyl corresponding base
  modified_base (15)..(15): 2'-deoxy-2'-fluoro corresponding base
  modified_base (16)..(16): 2'-O-methyl corresponding base
  modified_base (17)..(17): 2'-deoxy-2'-fluoro corresponding base
  modified_base (18)..(18): 2'-O-methyl corresponding base
  modified_base (19)..(19): 2'-deoxy-2'-fluoro corresponding base
  modified_base (20)..(20): deoxythymidine
  modified_base (21)..(21): 5'-thio thymidine
gccuggaguuuauucggaatt

SEQ ID NO: 1388 - DNA, 21 bp, Artificial Sequence
  Description of Artificial Sequence: Synthetic oligonucleotide
  Description of Combined DNA/RNA Molecule: Synthetic oligonucleotide
  siRNAs to PCSK9
  modified_base (1)..(1): 2'-hydroxy corresponding base
  modified_base (2)..(2): 2'-hydroxy corresponding base
  modified_base (3)..(3): 2'-hydroxy corresponding base
  modified_base (4)..(4): 2'-hydroxy corresponding base
  modified_base (5)..(5): 2'-hydroxy corresponding base
  modified_base (6)..(6): 2'-hydroxy corresponding base
  modified_base (7)..(7): 2'-hydroxy corresponding base
  modified_base (8)..(8): 2'-hydroxy corresponding base
  modified_base (9)..(9): 2'-hydroxy corresponding base
  modified_base (10)..(10): 2'-hydroxy corresponding base
  modified_base (11)..(11): 2'-hydroxy corresponding base
  modified_base (12)..(12): 2'-hydroxy corresponding base
  modified_base (13)..(13): 2'-hydroxy corresponding base
  modified_base (14)..(14): 2'-hydroxy corresponding base
  modified_base (15)..(15): 2'-hydroxy corresponding base
  modified_base (16)..(16): 2'-hydroxy corresponding base
  modified_base (17)..(17): 2'-hydroxy corresponding base
  modified_base (18)..(18): 2'-hydroxy corresponding base
  modified_base (19)..(19): 2'-hydroxy corresponding base
  modified_base (20)..(20): deoxythymidine
  modified_base (21)..(21): 5'-thio thymidine
uuccgaauaaacuccaggctt

SEQ ID NO: 1389 - DNA, 21 bp, Artificial Sequence
  Description of Artificial Sequence: Synthetic oligonucleotide
  Description of Combined DNA/RNA Molecule: Synthetic oligonucleotide
  siRNAs to PCSK9
  modified_base (1)..(1): 2'-deoxy-2'-fluoro corresponding base
  modified_base (2)..(2): 2'-O-methyl corresponding base
  modified_base (3)..(3): 2'-deoxy-2'-fluoro corresponding base
  modified_base (4)..(4): 2'-O-methyl corresponding base
  modified_base (5)..(5): 2'-deoxy-2'-fluoro corresponding base
  modified_base (6)..(6): 2'-O-methyl corresponding base
  modified_base (7)..(7): 2'-deoxy-2'-fluoro corresponding base
  modified_base (8)..(8): 2'-O-methyl corresponding base
  modified_base (9)..(9): 2'-deoxy-2'-fluoro corresponding base
  modified_base (10)..(10): 2'-O-methyl corresponding base
  modified_base (11)..(11): 2'-deoxy-2'-fluoro corresponding base
  modified_base (12)..(12): 2'-O-methyl corresponding base
  modified_base (13)..(13): 2'-deoxy-2'-fluoro corresponding base
  modified_base (14)..(14): 2'-O-methyl corresponding base
  modified_base (15)..(15): 2'-deoxy-2'-fluoro corresponding base
  modified_base (16)..(16): 2'-O-methyl corresponding base
  modified_base (17)..(17): 2'-deoxy-2'-fluoro corresponding base
  modified_base (18)..(18): 2'-O-methyl corresponding base
  modified_base (19)..(19): 2'-deoxy-2'-fluoro corresponding base
  modified_base (20)..(20): deoxythymidine
  modified_base (21)..(21): 5'-thio thymidine
gccuggaguuuauucggaatt

SEQ ID NO: 1390 - RNA, 21 nt, Artificial Sequence
  Description of Artificial Sequence: Synthetic oligonucleotide
  siRNAs to PCSK9
  modified_base (1)..(1): 2'-hydroxy corresponding base
  modified_base (2)..(2): 2'-hydroxy corresponding base
  modified_base (3)..(3): 2'-hydroxy corresponding base
  modified_base (4)..(4): 2'-hydroxy corresponding base
  modified_base (5)..(5): 2'-hydroxy corresponding base
  modified_base (6)..(6): 2'-hydroxy corresponding base
  modified_base (7)..(7): 2'-hydroxy corresponding base
  modified_base (8)..(8): 2'-hydroxy corresponding base
  modified_base (9)..(9): 2'-hydroxy corresponding base
  modified_base (10)..(10): 2'-hydroxy corresponding base
  modified_base (11)..(11): 2'-hydroxy corresponding base
  modified_base (12)..(12): 2'-hydroxy corresponding base
  modified_base (13)..(13): 2'-hydroxy corresponding base
  modified_base (14)..(14): 2'-hydroxy corresponding base
  modified_base (15)..(15): 2'-hydroxy corresponding base
  modified_base (16)..(16): 2'-hydroxy corresponding base
  modified_base (17)..(17): 2'-hydroxy corresponding base
  modified_base (18)..(18): 2'-hydroxy corresponding base
  modified_base (19)..(19): 2'-hydroxy corresponding base
  modified_base (20)..(20): 2'-O-methyl corresponding base 5'-monophosphorothioate
  modified_base (21)..(21): 2'-O-methyl corresponding base 5'-monophosphorothioate
uuccgaauaaacuccaggccu

SEQ ID NO: 1391 - DNA, 21 bp, Artificial Sequence
  Description of Artificial Sequence: Synthetic oligonucleotide
  Description of Combined DNA/RNA Molecule: Synthetic oligonucleotide
  siRNAs to PCSK9
  modified_base (1)..(1): 2'-deoxy-2'-fluoro corresponding base
  modified_base (2)..(2): 2'-O-methyl corresponding base
  modified_base (3)..(3): 2'-deoxy-2'-fluoro corresponding base
  modified_base (4)..(4): 2'-O-methyl corresponding base
  modified_base (5)..(5): 2'-deoxy-2'-fluoro corresponding base
  modified_base (6)..(6): 2'-O-methyl corresponding base
  modified_base (7)..(7): 2'-deoxy-2'-fluoro corresponding base
  modified_base (8)..(8): 2'-O-methyl corresponding base
  modified_base (9)..(9): 2'-deoxy-2'-fluoro corresponding base
  modified_base (10)..(10): 2'-O-methyl corresponding base
  modified_base (11)..(11): 2'-deoxy-2'-fluoro corresponding base
  modified_base (12)..(12): 2'-O-methyl corresponding base
  modified_base (13)..(13): 2'-deoxy-2'-fluoro corresponding base
  modified_base (14)..(14): 2'-O-methyl corresponding base
  modified_base (15)..(15): 2'-deoxy-2'-fluoro corresponding base
  modified_base (16)..(16): 2'-O-methyl corresponding base
  modified_base (17)..(17): 2'-deoxy-2'-fluoro corresponding base
  modified_base (18)..(18): 2'-O-methyl corresponding base
  modified_base (19)..(19): 2'-deoxy-2'-fluoro corresponding base
  modified_base (20)..(20): deoxythymidine
  modified_base (21)..(21): 5'-thio thymidine
gccuggaguuuauucggaatt

SEQ ID NO: 1392 - RNA, 21 nt, Artificial Sequence
  Description of Artificial Sequence: Synthetic oligonucleotide
  siRNAs to PCSK9
  modified_base (1)..(1): 2'-hydroxy corresponding base
  modified_base (2)..(2): 2'-hydroxy corresponding base
  modified_base (3)..(3): 2'-hydroxy corresponding base
  modified_base (4)..(4): 2'-hydroxy corresponding base
  modified_base (5)..(5): 2'-hydroxy corresponding base
  modified_base (6)..(6): 2'-O-methyl corresponding base
  modified_base (7)..(7): 2'-O-methyl corresponding base
  modified_base (8)..(8): 2'-hydroxy corresponding base
  modified_base (9)..(9): 2'-hydroxy corresponding base
  modified_base (10)..(10): 2'-O-methyl corresponding base
  modified_base (11)..(11): 2'-O-methyl corresponding base
  modified_base (12)..(12): 2'-hydroxy corresponding base
  modified_base (13)..(13): 2'-hydroxy corresponding base
  modified_base (14)..(14): 2'-hydroxy corresponding base
  modified_base (15)..(15): 2'-hydroxy corresponding base
  modified_base (16)..(16): 2'-hydroxy corresponding base
  modified_base (17)..(17): 2'-O-methyl corresponding base
  modified_base (18)..(18): 2'-O-methyl corresponding base
  modified_base (19)..(19): 2'-O-methyl corresponding base
  modified_base (20)..(20): 2'-O-methyl corresponding base 5'-monophosphorothioate
  modified_base (21)..(21): 2'-O-methyl corresponding base 5'-monophosphorothioate
uuccgaauaaacuccaggccu

SEQ ID NO: 1393 - DNA, 21 bp, Artificial Sequence
  Description of Artificial Sequence: Synthetic oligonucleotide
  Description of Combined DNA/RNA Molecule: Synthetic oligonucleotide
  siRNAs to PCSK9
  modified_base (1)..(1): 2'-hydroxy corresponding base
  modified_base (2)..(2): 2'-hydroxy corresponding base
  modified_base (3)..(3): 2'-hydroxy corresponding base
  modified_base (4)..(4): 2'-hydroxy corresponding base
  modified_base (5)..(5): 2'-hydroxy corresponding base
  modified_base (6)..(6): 2'-hydroxy corresponding base
  modified_base (7)..(7): 2'-hydroxy corresponding base
  modified_base (8)..(8): 2'-hydroxy corresponding base
  modified_base (9)..(9): 2'-hydroxy corresponding base
  modified_base (10)..(10): 2'-hydroxy corresponding base
  modified_base (11)..(11): 2'-hydroxy corresponding base
  modified_base (12)..(12): 2'-hydroxy corresponding base
  modified_base (13)..(13): 2'-hydroxy corresponding base
  modified_base (14)..(14): 2'-hydroxy corresponding base
  modified_base (15)..(15): 2'-hydroxy corresponding base
  modified_base (16)..(16): 2'-hydroxy corresponding base
  modified_base (17)..(17): 2'-hydroxy corresponding base
  modified_base (18)..(18): 2'-hydroxy corresponding base
  modified_base (19)..(19): 2'-hydroxy corresponding base
  modified_base (20)..(20): deoxythymidine
  modified_base (21)..(21): 5'-thio thymidine
gccuggaguuuauucggaatt

SEQ ID NO: 1394 - DNA, 21 bp, Artificial Sequence
  Description of Artificial Sequence: Synthetic oligonucleotide
  Description of Combined DNA/RNA Molecule: Synthetic oligonucleotide
  siRNAs to PCSK9
  modified_base (1)..(1): 2'-O-methyl corresponding base
  modified_base (2)..(2): 2'-deoxy-2'-fluoro corresponding base
  modified_base (3)..(3): 2'-O-methyl corresponding base
  modified_base (4)..(4): 2'-deoxy-2'-fluoro corresponding base
  modified_base (5)..(5): 2'-O-methyl corresponding base
  modified_base (6)..(6): 2'-deoxy-2'-fluoro corresponding base
  modified_base (7)..(7): 2'-O-methyl corresponding base
  modified_base (8)..(8): 2'-deoxy-2'-fluoro corresponding base
  modified_base (9)..(9): 2'-O-methyl corresponding base
  modified_base (10)..(10): 2'-deoxy-2'-fluoro corresponding base
  modified_base (11)..(11): 2'-O-methyl corresponding base
  modified_base (12)..(12): 2'-deoxy-2'-fluoro corresponding base
  modified_base (13)..(13): 2'-O-methyl corresponding base
  modified_base (14)..(14): 2'-deoxy-2'-fluoro corresponding base
  modified_base (15)..(15): 2'-O-methyl corresponding base
  modified_base (16)..(16): 2'-deoxy-2'-fluoro corresponding base
  modified_base (17)..(17): 2'-O-methyl corresponding base
  modified_base (18)..(18): 2'-deoxy-2'-fluoro corresponding base
  modified_base (19)..(19): 2'-O-methyl corresponding base
  modified_base (20)..(20): deoxythymidine
  modified_base (21)..(21): 5'-thio thymidine
uuccgaauaaacuccaggctt

SEQ ID NO: 1395 - DNA, 21 bp, Artificial Sequence
  Description of Artificial Sequence: Synthetic oligonucleotide
  Description of Combined DNA/RNA Molecule: Synthetic oligonucleotide
  siRNAs to PCSK9
  modified_base (1)..(1): 2'-hydroxy corresponding base
  modified_base (2)..(2): 2'-O-methyl corresponding base
  modified_base (3)..(3): 2'-O-methyl corresponding base
  modified_base (4)..(4): 2'-O-methyl corresponding base
  modified_base (5)..(5): 2'-hydroxy corresponding base
  modified_base (6)..(6): 2'-hydroxy corresponding base
  modified_base (7)..(7): 2'-hydroxy corresponding base
  modified_base (8)..(8): 2'-hydroxy corresponding base
  modified_base (9)..(9): 2'-O-methyl corresponding base
  modified_base (10)..(10): 2'-O-methyl corresponding base
  modified_base (11)..(11): 2'-O-methyl corresponding base
  modified_base (12)..(12): 2'-hydroxy corresponding base
  modified_base (13)..(13): 2'-O-methyl corresponding base
  modified_base (14)..(14): 2'-O-methyl corresponding base
  modified_base (15)..(15): 2'-O-methyl corresponding base
  modified_base (16)..(16): 2'-hydroxy corresponding base
  modified_base (17)..(17): 2'-hydroxy corresponding base
  modified_base (18)..(18): 2'-hydroxy corresponding base
  modified_base (19)..(19): 2'-hydroxy corresponding base
  modified_base (20)..(20): deoxythymidine
  modified_base (21)..(21): 5'-thio thymidine
gccuggaguuuauucggaatt

SEQ ID NO: 1396 - DNA, 21 bp, Artificial Sequence
  Description of Artificial Sequence: Synthetic oligonucleotide
  Description of Combined DNA/RNA Molecule: Synthetic oligonucleotide
  siRNAs to PCSK9
  modified_base (1)..(1): 2'-O-methyl corresponding base
  modified_base (2)..(2): 2'-deoxy-2'-fluoro corresponding base
  modified_base (3)..(3): 2'-O-methyl corresponding base
  modified_base (4)..(4): 2'-deoxy-2'-fluoro corresponding base
  modified_base (5)..(5): 2'-O-methyl corresponding base
  modified_base (6)..(6): 2'-deoxy-2'-fluoro corresponding base
  modified_base (7)..(7): 2'-O-methyl corresponding base
  modified_base (8)..(8): 2'-deoxy-2'-fluoro corresponding base
  modified_base (9)..(9): 2'-O-methyl corresponding base
  modified_base (10)..(10): 2'-deoxy-2'-fluoro corresponding base
  modified_base (11)..(11): 2'-O-methyl corresponding base
  modified_base (12)..(12): 2'-deoxy-2'-fluoro corresponding base
  modified_base (13)..(13): 2'-O-methyl corresponding base
  modified_base (14)..(14): 2'-deoxy-2'-fluoro corresponding base
  modified_base (15)..(15): 2'-O-methyl corresponding base
  modified_base (16)..(16): 2'-deoxy-2'-fluoro corresponding base
  modified_base (17)..(17): 2'-O-methyl corresponding base
  modified_base (18)..(18): 2'-deoxy-2'-fluoro corresponding base
  modified_base (19)..(19): 2'-O-methyl corresponding base
  modified_base (20)..(20): deoxythymidine
  modified_base (21)..(21): 5'-thio thymidine
uuccgaauaaacuccaggctt

SEQ ID NO: 1397 - DNA, 21 bp, Artificial Sequence
  Description of Artificial Sequence: Synthetic oligonucleotide
  Description of Combined DNA/RNA Molecule: Synthetic oligonucleotide
  siRNAs to PCSK9
  modified_base (1)..(1): 2'-hydroxy corresponding base
  modified_base (2)..(2): 2'-O-methyl corresponding base
  modified_base (3)..(3): 2'-hydroxy corresponding base
  modified_base (4)..(4): 2'-O-methyl corresponding base
  modified_base (5)..(5): 2'-hydroxy corresponding base
  modified_base (6)..(6): 2'-O-methyl corresponding base
  modified_base (7)..(7): 2'-hydroxy corresponding base
  modified_base (8)..(8): 2'-O-methyl corresponding base
  modified_base (9)..(9): 2'-hydroxy corresponding base
  modified_base (10)..(10): 2'-O-methyl corresponding base
  modified_base (11)..(11): 2'-hydroxy corresponding base
  modified_base (12)..(12): 2'-O-methyl corresponding base
  modified_base (13)..(13): 2'-hydroxy corresponding base
  modified_base (14)..(14): 2'-O-methyl corresponding base
  modified_base (15)..(15): 2'-hydroxy corresponding base
  modified_base (16)..(16): 2'-O-methyl corresponding base
  modified_base (17)..(17): 2'-hydroxy corresponding base
  modified_base (18)..(18): 2'-O-methyl corresponding base
  modified_base (19)..(19): 2'-hydroxy corresponding base
  modified_base (20)..(20): deoxythymidine
  modified_base (21)..(21): 5'-thio thymidine
gccuggaguuuauucggaatt

SEQ ID NO: 1398 - DNA, 21 bp, Artificial Sequence
  Description of Artificial Sequence: Synthetic oligonucleotide
  Description of Combined DNA/RNA Molecule: Synthetic oligonucleotide
  siRNAs to PCSK9
  modified_base (1)..(1): 2'-O-methyl corresponding base
  modified_base (2)..(2): 2'-deoxy-2'-fluoro corresponding base
  modified_base (3)..(3): 2'-O-methyl corresponding base
  modified_base (4)..(4): 2'-deoxy-2'-fluoro corresponding base
  modified_base (5)..(5): 2'-O-methyl corresponding base
  modified_base (6)..(6): 2'-deoxy-2'-fluoro corresponding base
  modified_base (7)..(7): 2'-O-methyl corresponding base
  modified_base (8)..(8): 2'-deoxy-2'-fluoro corresponding base
  modified_base (9)..(9): 2'-O-methyl corresponding base
  modified_base (10)..(10): 2'-deoxy-2'-fluoro corresponding base
  modified_base (11)..(11): 2'-O-methyl corresponding base
  modified_base (12)..(12): 2'-deoxy-2'-fluoro corresponding base
  modified_base (13)..(13): 2'-O-methyl corresponding base
  modified_base (14)..(14): 2'-deoxy-2'-fluoro corresponding base
  modified_base (15)..(15): 2'-O-methyl corresponding base
  modified_base (16)..(16): 2'-deoxy-2'-fluoro corresponding base
  modified_base (17)..(17): 2'-O-methyl corresponding base
  modified_base (18)..(18): 2'-deoxy-2'-fluoro corresponding base
  modified_base (19)..(19): 2'-O-methyl corresponding base
  modified_base (20)..(20): deoxythymidine
  modified_base (21)..(21): 5'-thio thymidine
uuccgaauaaacuccaggctt

SEQ ID NO: 1399 - DNA, 22 bp, Artificial Sequence
  Description of Artificial Sequence: Synthetic oligonucleotide
  Description of Combined DNA/RNA Molecule: Synthetic oligonucleotide
  siRNAs to PCSK9
  modified_base (1)..(1): 2'-deoxy-2'-fluoro corresponding base
  modified_base (2)..(2): 2'-O-methyl corresponding base
  modified_base (3)..(3): 2'-deoxy-2'-fluoro corresponding base
  modified_base (4)..(4): 2'-O-methyl corresponding base
  modified_base (5)..(5): 2'-deoxy-2'-fluoro corresponding base
  modified_base (6)..(6): 2'-O-methyl corresponding base
  modified_base (7)..(7): 2'-deoxy-2'-fluoro corresponding base
  modified_base (8)..(8): 2'-O-methyl corresponding base
  modified_base (9)..(9): 2'-deoxy-2'-fluoro corresponding base
  modified_base (10)..(10): 2'-O-methyl corresponding base
  modified_base (11)..(11): 2'-deoxy-2'-fluoro corresponding base
  modified_base (12)..(12): 2'-O-methyl corresponding base
  modified_base (13)..(13): 2'-deoxy-2'-fluoro corresponding base
  modified_base (14)..(14): 2'-O-methyl corresponding base
  modified_base (15)..(15): 2'-deoxy-2'-fluoro corresponding base
  modified_base (16)..(16): 2'-O-methyl corresponding base
  modified_base (17)..(17): 2'-deoxy-2'-fluoro corresponding base
  modified_base (18)..(18): 2'-O-methyl corresponding base
  modified_base (19)..(19): 2'-deoxy-2'-fluoro corresponding base
  modified_base (20)..(20): deoxythymidine
  modified_base (21)..(21): deoxythymidine
  modified_base (22)..(22): abasic nucleotide
gccuggaguuuauucggaattn

SEQ ID NO: 1400 - DNA, 22 bp, Artificial Sequence
  Description of Artificial Sequence: Synthetic oligonucleotide
  Description of Combined DNA/RNA Molecule: Synthetic oligonucleotide
  siRNAs to PCSK9
  modified_base (1)..(1): 2'-O-methyl corresponding base
  modified_base (2)..(2): 2'-deoxy-2'-fluoro corresponding base
  modified_base (3)..(3): 2'-O-methyl corresponding base
  modified_base (4)..(4): 2'-deoxy-2'-fluoro corresponding base
  modified_base (5)..(5): 2'-O-methyl corresponding base
  modified_base (6)..(6): 2'-deoxy-2'-fluoro corresponding base
  modified_base (7)..(7): 2'-O-methyl corresponding base
  modified_base (8)..(8): 2'-deoxy-2'-fluoro corresponding base
  modified_base (9)..(9): 2'-O-methyl corresponding base
  modified_base (10)..(10): 2'-deoxy-2'-fluoro corresponding base
  modified_base (11)..(11): 2'-O-methyl corresponding base
  modified_base (12)..(12): 2'-deoxy-2'-fluoro corresponding base
  modified_base (13)..(13): 2'-O-methyl corresponding base
  modified_base (14)..(14): 2'-deoxy-2'-fluoro corresponding base
  modified_base (15)..(15): 2'-O-methyl corresponding base
  modified_base (16)..(16): 2'-deoxy-2'-fluoro corresponding base
  modified_base (17)..(17): 2'-O-methyl corresponding base
  modified_base (18)..(18): 2'-deoxy-2'-fluoro corresponding base
  modified_base (19)..(19): 2'-O-methyl corresponding base
  modified_base (20)..(20): deoxythymidine
  modified_base (21)..(21): deoxythymidine
  modified_base (22)..(22): abasic nucleotide
uuccgaauaaacuccaggcttn

SEQ ID NO: 1401 - RNA, 19 nt, Artificial Sequence
  Description of Artificial Sequence: Synthetic oligonucleotide
  siRNAs to PCSK9
  modified_base (1)..(1): 2'-deoxy-2'-fluoro corresponding base
  modified_base (2)..(2): 2'-O-methyl corresponding base
  modified_base (3)..(3): 2'-deoxy-2'-fluoro corresponding base
  modified_base (4)..(4): 2'-O-methyl corresponding base
  modified_base (5)..(5): 2'-deoxy-2'-fluoro corresponding base
  modified_base (6)..(6): 2'-O-methyl corresponding base
  modified_base (7)..(7): 2'-deoxy-2'-fluoro corresponding base
  modified_base (8)..(8): 2'-O-methyl corresponding base
  modified_base (9)..(9): 2'-deoxy-2'-fluoro corresponding base
  modified_base (10)..(10): 2'-O-methyl corresponding base
  modified_base (11)..(11): 2'-deoxy-2'-fluoro corresponding base
  modified_base (12)..(12): 2'-O-methyl corresponding base
  modified_base (13)..(13): 2'-deoxy-2'-fluoro corresponding base
  modified_base (14)..(14): 2'-O-methyl corresponding base
  modified_base (15)..(15): 2'-deoxy-2'-fluoro corresponding base
  modified_base (16)..(16): 2'-O-methyl corresponding base
  modified_base (17)..(17): 2'-deoxy-2'-fluoro corresponding base
  modified_base (18)..(18): 2'-O-methyl corresponding base
  modified_base (19)..(19): 2'-deoxy-2'-fluoro corresponding base
gccuggaguuuauucggaa

SEQ ID NO: 1402 - RNA, 21 nt, Artificial Sequence
  Description of Artificial Sequence: Synthetic oligonucleotide
  siRNAs to PCSK9
  modified_base (1)..(1): 2'-O-methyl corresponding base
  modified_base (2)..(2): 2'-deoxy-2'-fluoro corresponding base
  modified_base (3)..(3): 2'-O-methyl corresponding base
  modified_base (4)..(4): 2'-deoxy-2'-fluoro corresponding base
  modified_base (5)..(5): 2'-O-methyl corresponding base
  modified_base (6)..(6): 2'-deoxy-2'-fluoro corresponding base
  modified_base (7)..(7): 2'-O-methyl corresponding base
  modified_base (8)..(8): 2'-deoxy-2'-fluoro corresponding base
  modified_base (9)..(9): 2'-O-methyl corresponding base
  modified_base (10)..(10): 2'-deoxy-2'-fluoro corresponding base
  modified_base (11)..(11): 2'-O-methyl corresponding base
  modified_base (12)..(12): 2'-deoxy-2'-fluoro corresponding base
  modified_base (13)..(13): 2'-O-methyl corresponding base
  modified_base (14)..(14): 2'-deoxy-2'-fluoro corresponding base
  modified_base (15)..(15): 2'-O-methyl corresponding base
  modified_base (16)..(16): 2'-deoxy-2'-fluoro corresponding base
  modified_base (17)..(17): 2'-O-methyl corresponding base
  modified_base (18)..(18): 2'-deoxy-2'-fluoro corresponding base
  modified_base (19)..(19): 2'-O-methyl corresponding base
  modified_base (20)..(20): 2'-deoxy-2'-fluoro corresponding base 5'-monophosphorothioate
  modified_base (21)..(21): 2'-O-methyl corresponding base 5'-monophosphorothioate
uuccgaauaaacuccaggccu

SEQ ID NO: 1403 - RNA, 19 nt, Artificial Sequence
  Description of Artificial Sequence: Synthetic oligonucleotide
  siRNAs to PCSK9
  modified_base (1)..(1): 2'-deoxy-2'-fluoro corresponding base
  modified_base (2)..(2): 2'-O-methyl corresponding base
  modified_base (3)..(3): 2'-deoxy-2'-fluoro corresponding base
  modified_base (4)..(4): 2'-O-methyl corresponding base
  modified_base (5)..(5): 2'-deoxy-2'-fluoro corresponding base
  modified_base (6)..(6): 2'-O-methyl corresponding base
  modified_base (7)..(7): 2'-deoxy-2'-fluoro corresponding base
  modified_base (8)..(8): 2'-O-methyl corresponding base
  modified_base (9)..(9): 2'-deoxy-2'-fluoro corresponding base
  modified_base (10)..(10): 2'-O-methyl corresponding base
  modified_base (11)..(11): 2'-deoxy-2'-fluoro corresponding base
  modified_base (12)..(12): 2'-O-methyl corresponding base
  modified_base (13)..(13): 2'-deoxy-2'-fluoro corresponding base
  modified_base (14)..(14): 2'-O-methyl corresponding base
  modified_base (15)..(15): 2'-deoxy-2'-fluoro corresponding base
  modified_base (16)..(16): 2'-O-methyl corresponding base
  modified_base (17)..(17): 2'-deoxy-2'-fluoro corresponding base
  modified_base (18)..(18): 2'-O-methyl corresponding base
  modified_base (19)..(19): 2'-deoxy-2'-fluoro corresponding base
gccuggaguuuauucggaa

SEQ ID NO: 1404 - RNA, 21 nt, Artificial Sequence
  Description of Artificial Sequence: Synthetic oligonucleotide
  siRNAs to PCSK9
  modified_base (1)..(1): 2'-hydroxy corresponding base
  modified_base (2)..(2): 2'-hydroxy corresponding base
  modified_base (3)..(3): 2'-hydroxy corresponding base
  modified_base (4)..(4): 2'-hydroxy corresponding base
  modified_base (5)..(5): 2'-hydroxy corresponding base
  modified_base (6)..(6): 2'-O-methyl corresponding base
  modified_base (7)..(7): 2'-O-methyl corresponding base
  modified_base (8)..(8): 2'-hydroxy corresponding base
  modified_base (9)..(9): 2'-hydroxy corresponding base
  modified_base (10)..(10): 2'-O-methyl corresponding base
  modified_base (11)..(11): 2'-O-methyl corresponding base
  modified_base (12)..(12): 2'-hydroxy corresponding base
  modified_base (13)..(13): 2'-hydroxy corresponding base
  modified_base (14)..(14): 2'-hydroxy corresponding base
  modified_base (15)..(15): 2'-hydroxy corresponding base
  modified_base (16)..(16): 2'-hydroxy corresponding base
  modified_base (17)..(17): 2'-O-methyl corresponding base
  modified_base (18)..(18): 2'-O-methyl corresponding base
  modified_base (19)..(19): 2'-O-methyl corresponding base
  modified_base (20)..(20): 2'-O-methyl corresponding base 5'-monophosphorothioate
  modified_base (21)..(21): 2'-O-methyl corresponding base 5'-monophosphorothioate
uuccgaauaaacuccaggccu

SEQ ID NO: 1405 - RNA, 19 nt, Artificial Sequence
  Description of Artificial Sequence: Synthetic oligonucleotide
  siRNAs to PCSK9
  modified_base (1)..(1): 2'-deoxy-2'-fluoro corresponding base
  modified_base (2)..(2): 2'-O-methyl corresponding base
  modified_base (3)..(3): 2'-deoxy-2'-fluoro corresponding base
  modified_base (4)..(4): 2'-O-methyl corresponding base
  modified_base (5)..(5): 2'-deoxy-2'-fluoro corresponding base
  modified_base (6)..(6): 2'-O-methyl corresponding base
  modified_base (7)..(7): 2'-deoxy-2'-fluoro corresponding base
  modified_base (8)..(8): 2'-O-methyl corresponding base
  modified_base (9)..(9): 2'-deoxy-2'-fluoro corresponding base
  modified_base (10)..(10): 2'-O-methyl corresponding base
  modified_base (11)..(11): 2'-deoxy-2'-fluoro corresponding base
  modified_base (12)..(12): 2'-O-methyl corresponding base
  modified_base (13)..(13): 2'-deoxy-2'-fluoro corresponding base
  modified_base (14)..(14): 2'-O-methyl corresponding base
  modified_base (15)..(15): 2'-deoxy-2'-fluoro corresponding base
  modified_base (16)..(16): 2'-O-methyl corresponding base
  modified_base (17)..(17): 2'-deoxy-2'-fluoro corresponding base
  modified_base (18)..(18): 2'-O-methyl corresponding base
  modified_base (19)..(19): 2'-deoxy-2'-fluoro corresponding base
gccuggaguuuauucggaa

SEQ ID NO: 1406 - RNA, 21 nt, Artificial Sequence
  Description of Artificial Sequence: Synthetic oligonucleotide
  siRNAs to PCSK9
  modified_base (1)..(1): 2'-hydroxy corresponding base
  modified_base (2)..(2): 2'-hydroxy corresponding base
  modified_base (3)..(3): 2'-hydroxy corresponding base
  modified_base (4)..(4): 2'-hydroxy corresponding base
  modified_base (5)..(5): 2'-hydroxy corresponding base
  modified_base (6)..(6): 2'-hydroxy corresponding base
  modified_base (7)..(7): 2'-hydroxy corresponding base
  modified_base (8)..(8): 2'-hydroxy corresponding base
  modified_base (9)..(9): 2'-hydroxy corresponding base
  modified_base (10)..(10): 2'-hydroxy corresponding base
  modified_base (11)..(11): 2'-hydroxy corresponding base
  modified_base (12)..(12): 2'-hydroxy corresponding base
  modified_base (13)..(13): 2'-hydroxy corresponding base
  modified_base (14)..(14): 2'-hydroxy corresponding base
  modified_base (15)..(15): 2'-hydroxy corresponding base
  modified_base (16)..(16): 2'-hydroxy corresponding base
  modified_base (17)..(17): 2'-hydroxy corresponding base
  modified_base (18)..(18): 2'-hydroxy corresponding base
  modified_base (19)..(19): 2'-hydroxy corresponding base
  modified_base (20)..(20): 2'-O-methyl corresponding base 5'-monophosphorothioate
  modified_base (21)..(21): 2'-O-methyl corresponding base 5'-monophosphorothioate
uuccgaauaaacuccaggccu

SEQ ID NO: 1407 - RNA, 19 nt, Artificial Sequence
  Description of Artificial Sequence: Synthetic oligonucleotide
  siRNAs to PCSK9
  modified_base (1)..(1): 2'-deoxy-2'-fluoro corresponding base
  modified_base (2)..(2): 2'-O-methyl corresponding base
  modified_base (3)..(3): 2'-deoxy-2'-fluoro corresponding base
  modified_base (4)..(4): 2'-O-methyl corresponding base
  modified_base (5)..(5): 2'-deoxy-2'-fluoro corresponding base
  modified_base (6)..(6): 2'-O-methyl corresponding base
  modified_base (7)..(7): 2'-deoxy-2'-fluoro corresponding base
  modified_base (8)..(8): 2'-O-methyl corresponding base
  modified_base (9)..(9): 2'-deoxy-2'-fluoro corresponding base
  modified_base (10)..(10): 2'-O-methyl corresponding base
  modified_base (11)..(11): 2'-deoxy-2'-fluoro corresponding base
  modified_base (12)..(12): 2'-O-methyl corresponding base
  modified_base (13)..(13): 2'-deoxy-2'-fluoro corresponding base
  modified_base (14)..(14): 2'-O-methyl corresponding base
  modified_base (15)..(15): 2'-deoxy-2'-fluoro corresponding base
  modified_base (16)..(16): 2'-O-methyl corresponding base
  modified_base (17)..(17): 2'-deoxy-2'-fluoro corresponding base
  modified_base (18)..(18): 2'-O-methyl corresponding base
  modified_base (19)..(19): 2'-deoxy-2'-fluoro corresponding base
gccuggaguuuauucggaa

SEQ ID NO: 1408 - DNA, 21 bp, Artificial Sequence
  Description of Artificial Sequence: Synthetic oligonucleotide
  Description of Combined DNA/RNA Molecule: Synthetic oligonucleotide
  siRNAs to PCSK9
  modified_base (1)..(1): 2'-hydroxy corresponding base
  modified_base (2)..(2): 2'-hydroxy corresponding base
  modified_base (3)..(3): 2'-hydroxy corresponding base
  modified_base (4)..(4): 2'-hydroxy corresponding base
  modified_base (5)..(5): 2'-hydroxy corresponding base
  modified_base (6)..(6): 2'-hydroxy corresponding base
  modified_base (7)..(7): 2'-hydroxy corresponding base
  modified_base (8)..(8): 2'-O-methyl corresponding base
  modified_base (9)..(9): 2'-hydroxy corresponding base
  modified_base (10)..(10): 2'-hydroxy corresponding base
  modified_base (11)..(11): 2'-hydroxy corresponding base
  modified_base (12)..(12): 2'-hydroxy corresponding base
  modified_base (13)..(13): 2'-hydroxy corresponding base
  modified_base (14)..(14): 2'-hydroxy corresponding base
  modified_base (15)..(15): 2'-O-methyl corresponding base
  modified_base (16)..(16): 2'-hydroxy corresponding base
  modified_base (17)..(17): 2'-hydroxy corresponding base
  modified_base (18)..(18): 2'-hydroxy corresponding base
  modified_base (19)..(19): 2'-hydroxy corresponding base
  modified_base (20)..(20): deoxythymidine
  modified_base (21)..(21): 5'-thio thymidine
uuccgaauaaacuccaggctt

SEQ ID NO: 1409 - RNA, 19 nt, Artificial Sequence
  Description of Artificial Sequence: Synthetic oligonucleotide
  siRNAs to PCSK9
  modified_base (1)..(1): 2'-deoxy-2'-fluoro corresponding base
  modified_base (2)..(2): 2'-O-methyl corresponding base
  modified_base (3)..(3): 2'-deoxy-2'-fluoro corresponding base
  modified_base (4)..(4): 2'-O-methyl corresponding base
  modified_base (5)..(5): 2'-deoxy-2'-fluoro corresponding base
  modified_base (6)..(6): 2'-O-methyl corresponding base
  modified_base (7)..(7): 2'-deoxy-2'-fluoro corresponding base
  modified_base (8)..(8): 2'-O-methyl corresponding base
  modified_base (9)..(9): 2'-deoxy-2'-fluoro corresponding base
  modified_base (10)..(10): 2'-O-methyl corresponding base
  modified_base (11)..(11): 2'-deoxy-2'-fluoro corresponding base
  modified_base (12)..(12): 2'-O-methyl corresponding base
  modified_base (13)..(13): 2'-deoxy-2'-fluoro corresponding base
  modified_base (14)..(14): 2'-O-methyl corresponding base
  modified_base (15)..(15): 2'-deoxy-2'-fluoro corresponding base
  modified_base (16)..(16): 2'-O-methyl corresponding base
  modified_base (17)..(17): 2'-deoxy-2'-fluoro corresponding base
  modified_base (18)..(18): 2'-O-methyl corresponding base
  modified_base (19)..(19): 2'-deoxy-2'-fluoro corresponding base
gccuggaguuuauucggaa

SEQ ID NO: 1410 - DNA, 21 bp, Artificial Sequence
  Description of Artificial Sequence: Synthetic oligonucleotide
  Description of Combined DNA/RNA Molecule: Synthetic oligonucleotide
  siRNAs to PCSK9
  modified_base (1)..(1): 2'-O-methyl corresponding base
  modified_base (2)..(2): 2'-hydroxy corresponding base
  modified_base (3)..(3): 2'-O-methyl corresponding base
  modified_base (4)..(4): 2'-hydroxy corresponding base
  modified_base (5)..(5): 2'-hydroxy corresponding base
  modified_base (6)..(6): 2'-hydroxy corresponding base
  modified_base (7)..(7): 2'-hydroxy corresponding base
  modified_base (8)..(8): 2'-O-methyl corresponding base
  modified_base (9)..(9): 2'-hydroxy corresponding base
  modified_base (10)..(10): 2'-hydroxy corresponding base
  modified_base (11)..(11): 2'-hydroxy corresponding base
  modified_base (12)..(12): 2'-hydroxy corresponding base
  modified_base (13)..(13): 2'-hydroxy corresponding base
  modified_base (14)..(14): 2'-O-methyl corresponding base
  modified_base (15)..(15): 2'-O-methyl corresponding base
  modified_base (16)..(16): 2'-hydroxy corresponding base
  modified_base (17)..(17): 2'-hydroxy corresponding base
  modified_base (18)..(18): 2'-hydroxy corresponding base
  modified_base (19)..(19): 2'-hydroxy corresponding base
  modified_base (20)..(20): deoxythymidine
  modified_base (21)..(21): 5'-thio thymidine
uuccgaauaaacuccaggctt

SEQ ID NO: 1411 - RNA, 19 nt, Artificial Sequence
  Description of Artificial Sequence: Synthetic oligonucleotide
  siRNAs to PCSK9
  modified_base (1)..(1): 2'-hydroxy corresponding base
  modified_base (2)..(2): 2'-O-methoxyethyl corresponding base
  modified_base (3)..(3): 2'-hydroxy corresponding base
  modified_base (4)..(4): 2'-O-methoxyethyl corresponding base
  modified_base (5)..(5): 2'-hydroxy corresponding base
  modified_base (6)..(6): 2'-O-methoxyethyl corresponding base
  modified_base (7)..(7): 2'-hydroxy corresponding base
  modified_base (8)..(8): 2'-O-methyl corresponding base
  modified_base (9)..(9): 2'-hydroxy corresponding base
  modified_base (10)..(10): 2'-O-methoxyethyl corresponding base
  modified_base (11)..(11): 2'-hydroxy corresponding base
  modified_base (12)..(12): 2'-O-methoxyethyl corresponding base
  modified_base (13)..(13): 2'-hydroxy corresponding base
  modified_base (14)..(14): 2'-O-methoxyethyl corresponding base
  modified_base (15)..(15): 2'-hydroxy corresponding base
  modified_base (16)..(16): 2'-O-methoxyethyl corresponding base
  modified_base (17)..(17): 2'-hydroxy corresponding base
  modified_base (18)..(18): 2'-O-methoxyethyl corresponding base
  modified_base (19)..(19): 2'-hydroxy corresponding base
gccuggaguuuauucggaa

SEQ ID NO: 1412 - RNA, 19 nt, Artificial Sequence
  Description of Artificial Sequence: Synthetic oligonucleotide
  siRNAs to PCSK9
  modified_base (1)..(1): 2'-hydroxy corresponding base
  modified_base (2)..(2): 2'-hydroxy corresponding base
  modified_base (3)..(3): 2'-hydroxy corresponding base
  modified_base (4)..(4): 2'-hydroxy corresponding base
  modified_base (5)..(5): 2'-hydroxy corresponding base
  modified_base (6)..(6): 2'-O-methyl corresponding base
  modified_base (7)..(7): 2'-O-methyl corresponding base
  modified_base (8)..(8): 2'-hydroxy corresponding base
  modified_base (9)..(9): 2'-hydroxy corresponding base
  modified_base (10)..(10): 2'-O-methyl corresponding base
  modified_base (11)..(11): 2'-O-methyl corresponding base
  modified_base (12)..(12): 2'-hydroxy corresponding base
  modified_base (13)..(13): 2'-hydroxy corresponding base
  modified_base (14)..(14): 2'-hydroxy corresponding base
  modified_base (15)..(15): 2'-hydroxy corresponding base
  modified_base (16)..(16): 2'-hydroxy corresponding base
  modified_base (17)..(17): 2'-O-methyl corresponding base
  modified_base (18)..(18): 2'-O-methyl corresponding base
  modified_base (19)..(19): 2'-O-methyl corresponding base
uuccgaauaaacuccaggc

SEQ ID NO: 1413 - RNA, 19 nt, Artificial Sequence
  Description of Artificial Sequence: Synthetic oligonucleotide
  siRNAs to PCSK9
  modified_base (1)..(1): 2'-hydroxy corresponding base
  modified_base (2)..(2): 2'-O-methoxyethyl corresponding base
  modified_base (3)..(3): 2'-hydroxy corresponding base
  modified_base (4)..(4): 2'-O-methoxyethyl corresponding base
  modified_base (5)..(5): 2'-hydroxy corresponding base
  modified_base (6)..(6): 2'-O-methoxyethyl corresponding base
  modified_base (7)..(7): 2'-hydroxy corresponding base
  modified_base (8)..(8): 2'-O-methyl corresponding base
  modified_base (9)..(9): 2'-hydroxy corresponding base
  modified_base (10)..(10): 2'-O-methoxyethyl corresponding base
  modified_base (11)..(11): 2'-hydroxy corresponding base
  modified_base (12)..(12): 2'-O-methoxyethyl corresponding base
  modified_base (13)..(13): 2'-hydroxy corresponding base
  modified_base (14)..(14): 2'-O-methoxyethyl corresponding base
  modified_base (15)..(15): 2'-hydroxy corresponding base
  modified_base (16)..(16): 2'-O-methoxyethyl corresponding base
  modified_base (17)..(17): 2'-hydroxy corresponding base
  modified_base (18)..(18): 2'-O-methoxyethyl corresponding base
  modified_base (19)..(19): 2'-hydroxy corresponding base
gccuggaguuuauucggaa

SEQ ID NO: 1414 - RNA, 19 nt, Artificial Sequence
  Description of Artificial Sequence: Synthetic oligonucleotide
  siRNAs to PCSK9
  modified_base (1)..(1): 2'-O-methyl corresponding base
  modified_base (2)..(2): 2'-deoxy-2'-fluoro corresponding base
  modified_base (3)..(3): 2'-O-methyl corresponding base
  modified_base (4)..(4): 2'-deoxy-2'-fluoro corresponding base
  modified_base (5)..(5): 2'-O-methyl corresponding base
  modified_base (6)..(6): 2'-deoxy-2'-fluoro corresponding base
  modified_base (7)..(7): 2'-O-methyl corresponding base
  modified_base (8)..(8): 2'-deoxy-2'-fluoro corresponding base
  modified_base (9)..(9): 2'-O-methyl corresponding base
  modified_base (10)..(10): 2'-deoxy-2'-fluoro corresponding base
  modified_base (11)..(11): 2'-O-methyl corresponding base
  modified_base (12)..(12): 2'-deoxy-2'-fluoro corresponding base
  modified_base (13)..(13): 2'-O-methyl corresponding base
  modified_base (14)..(14): 2'-deoxy-2'-fluoro corresponding base
  modified_base (15)..(15): 2'-O-methyl corresponding base
  modified_base (16)..(16): 2'-deoxy-2'-fluoro corresponding base
  modified_base (17)..(17): 2'-O-methyl corresponding base
  modified_base (18)..(18): 2'-deoxy-2'-fluoro corresponding base
  modified_base (19)..(19): 2'-O-methyl corresponding base
uuccgaauaaacuccaggc

SEQ ID NO: 1415 - RNA, 19 nt, Artificial Sequence
  Description of Artificial Sequence: Synthetic oligonucleotide
  siRNAs to PCSK9
  modified_base (1)..(1): 2'-hydroxy corresponding base
  modified_base (2)..(2): 2'-O-methoxyethyl corresponding base
  modified_base (3)..(3): 2'-hydroxy corresponding base
  modified_base (4)..(4): 2'-O-methoxyethyl corresponding base
  modified_base (5)..(5): 2'-hydroxy corresponding base
  modified_base (6)..(6): 2'-O-methoxyethyl corresponding base
  modified_base (7)..(7): 2'-hydroxy corresponding base
  modified_base (8)..(8): 2'-O-methyl corresponding base
  modified_base (9)..(9): 2'-hydroxy corresponding base
  modified_base (10)..(10): 2'-O-methoxyethyl corresponding base
  modified_base (11)..(11): 2'-hydroxy corresponding base
  modified_base (12)..(12): 2'-O-methoxyethyl corresponding base
  modified_base (13)..(13): 2'-hydroxy corresponding base
  modified_base (14)..(14): 2'-O-methoxyethyl corresponding base
  modified_base (15)..(15): 2'-hydroxy corresponding base
  modified_base (16)..(16): 2'-O-methoxyethyl corresponding base
  modified_base (17)..(17): 2'-hydroxy corresponding base
  modified_base (18)..(18): 2'-O-methoxyethyl corresponding base
  modified_base (19)..(19): 2'-hydroxy corresponding base
gccuggaguuuauucggaa

SEQ ID NO: 1416 - RNA, 21 nt, Artificial Sequence
  Description of Artificial Sequence: Synthetic oligonucleotide
  siRNAs to PCSK9
  modified_base (1)..(1): 2'-O-methyl corresponding base
  modified_base (2)..(2): 2'-deoxy-2'-fluoro corresponding base
  modified_base (3)..(3): 2'-O-methyl corresponding base
  modified_base (4)..(4): 2'-deoxy-2'-fluoro corresponding base
  modified_base (5)..(5): 2'-O-methyl corresponding base
  modified_base (6)..(6): 2'-deoxy-2'-fluoro corresponding base
  modified_base (7)..(7): 2'-O-methyl corresponding base
  modified_base (8)..(8): 2'-deoxy-2'-fluoro corresponding base
  modified_base (9)..(9): 2'-O-methyl corresponding base
  modified_base (10)..(10): 2'-deoxy-2'-fluoro corresponding base
  modified_base (11)..(11): 2'-O-methyl corresponding base
  modified_base (12)..(12): 2'-deoxy-2'-fluoro corresponding base
  modified_base (13)..(13): 2'-O-methyl corresponding base
  modified_base (14)..(14): 2'-deoxy-2'-fluoro corresponding base
  modified_base (15)..(15): 2'-O-methyl corresponding base
  modified_base (16)..(16): 2'-deoxy-2'-fluoro corresponding base
  modified_base (17)..(17): 2'-O-methyl corresponding base
  modified_base (18)..(18): 2'-deoxy-2'-fluoro corresponding base
  modified_base (19)..(19): 2'-O-methyl corresponding base
  modified_base (20)..(20): 2'-deoxy-2'-fluoro corresponding base 5'-monophosphorothioate
  modified_base (21)..(21): 2'-O-methyl corresponding base 5'-monophosphorothioate
uuccgaauaaacuccaggccu

SEQ ID NO: 1417 - RNA, 19 nt, Artificial Sequence
  Description of Artificial Sequence: Synthetic oligonucleotide
  siRNAs to PCSK9
  modified_base (1)..(1): 2'-hydroxy corresponding base
  modified_base (2)..(2): 2'-O-methoxyethyl corresponding base
  modified_base (3)..(3): 2'-hydroxy corresponding base
  modified_base (4)..(4): 2'-O-methoxyethyl corresponding base
  modified_base (5)..(5): 2'-hydroxy corresponding base
  modified_base (6)..(6): 2'-O-methoxyethyl corresponding base
  modified_base (7)..(7): 2'-hydroxy corresponding base
  modified_base (8)..(8): 2'-O-methyl corresponding base
  modified_base (9)..(9): 2'-hydroxy corresponding base
  modified_base (10)..(10): 2'-O-methoxyethyl corresponding base
  modified_base (11)..(11): 2'-hydroxy corresponding base
  modified_base (12)..(12): 2'-O-methoxyethyl corresponding base
  modified_base (13)..(13): 2'-hydroxy corresponding base
  modified_base (14)..(14): 2'-O-methoxyethyl corresponding base
  modified_base (15)..(15): 2'-hydroxy corresponding base
  modified_base (16)..(16): 2'-O-methoxyethyl corresponding base
  modified_base (17)..(17): 2'-hydroxy corresponding base
  modified_base (18)..(18): 2'-O-methoxyethyl corresponding base
  modified_base (19)..(19): 2'-hydroxy corresponding base
gccuggaguuuauucggaa

SEQ ID NO: 1418 - RNA, 21 nt, Artificial Sequence
  Description of Artificial Sequence: Synthetic oligonucleotide
  siRNAs to PCSK9
  modified_base (1)..(1): 2'-hydroxy corresponding base
  modified_base (2)..(2): 2'-hydroxy corresponding base
  modified_base (3)..(3): 2'-hydroxy corresponding base
  modified_base (4)..(4): 2'-hydroxy corresponding base
  modified_base (5)..(5): 2'-hydroxy corresponding base
  modified_base (6)..(6): 2'-hydroxy corresponding base
  modified_base (7)..(7): 2'-hydroxy corresponding base
  modified_base (8)..(8): 2'-hydroxy corresponding base
  modified_base (9)..(9): 2'-hydroxy corresponding base
  modified_base (10)..(10): 2'-hydroxy corresponding base
  modified_base (11)..(11): 2'-hydroxy corresponding base
  modified_base (12)..(12): 2'-hydroxy corresponding base
  modified_base (13)..(13): 2'-hydroxy corresponding base
  modified_base (14)..(14): 2'-hydroxy corresponding base
  modified_base (15)..(15): 2'-hydroxy corresponding base
  modified_base (16)..(16): 2'-hydroxy corresponding base
  modified_base (17)..(17): 2'-hydroxy corresponding base
  modified_base (18)..(18): 2'-hydroxy corresponding base
  modified_base (19)..(19): 2'-hydroxy corresponding base
  modified_base (20)..(20): 2'-O-methyl corresponding base 5'-monophosphorothioate
  modified_base (21)..(21): 2'-O-methyl corresponding base 5'-monophosphorothioate
uuccgaauaaacuccaggccu

SEQ ID NO: 1419 - RNA, 19 nt, Artificial Sequence
  Description of Artificial Sequence: Synthetic oligonucleotide
  siRNAs to PCSK9
  modified_base (1)..(1): 2'-hydroxy corresponding base
  modified_base (2)..(2): 2'-O-methoxyethyl corresponding base
  modified_base (3)..(3): 2'-hydroxy corresponding base
  modified_base (4)..(4): 2'-O-methoxyethyl corresponding base
  modified_base (5)..(5): 2'-hydroxy corresponding base
  modified_base (6)..(6): 2'-O-methoxyethyl corresponding base
  modified_base (7)..(7): 2'-hydroxy corresponding base
  modified_base (8)..(8): 2'-O-methyl corresponding base
  modified_base (9)..(9): 2'-hydroxy corresponding base
  modified_base (10)..(10): 2'-O-methoxyethyl corresponding base
  modified_base (11)..(11): 2'-hydroxy corresponding base
  modified_base (12)..(12): 2'-O-methoxyethyl corresponding base
  modified_base (13)..(13): 2'-hydroxy corresponding base
  modified_base (14)..(14): 2'-O-methoxyethyl corresponding base
  modified_base (15)..(15): 2'-hydroxy corresponding base
  modified_base (16)..(16): 2'-O-methoxyethyl corresponding base
  modified_base (17)..(17): 2'-hydroxy corresponding base
  modified_base (18)..(18): 2'-O-methoxyethyl corresponding base
  modified_base (19)..(19): 2'-hydroxy corresponding base
gccuggaguuuauucggaa

SEQ ID NO: 1420 - DNA, 21 bp, Artificial Sequence
  Description of Artificial Sequence: Synthetic oligonucleotide
  Description of Combined DNA/RNA Molecule: Synthetic oligonucleotide
  siRNAs to PCSK9
  modified_base (1)..(1): 2'-hydroxy corresponding base
  modified_base (2)..(2): 2'-hydroxy corresponding base
  modified_base (3)..(3): 2'-hydroxy corresponding base
  modified_base (4)..(4): 2'-hydroxy corresponding base
  modified_base (5)..(5): 2'-hydroxy corresponding base
  modified_base (6)..(6): 2'-hydroxy corresponding base
  modified_base (7)..(7): 2'-hydroxy corresponding base
  modified_base (8)..(8): 2'-O-methyl corresponding base
  modified_base (9)..(9): 2'-hydroxy corresponding base
  modified_base (10)..(10): 2'-hydroxy corresponding base
  modified_base (11)..(11): 2'-hydroxy corresponding base
  modified_base (12)..(12): 2'-hydroxy corresponding base
  modified_base (13)..(13): 2'-hydroxy corresponding base
  modified_base (14)..(14): 2'-hydroxy corresponding base
  modified_base (15)..(15): 2'-O-methyl corresponding base
  modified_base (16)..(16): 2'-hydroxy corresponding base
  modified_base (17)..(17): 2'-hydroxy corresponding base
  modified_base (18)..(18): 2'-hydroxy corresponding base
  modified_base (19)..(19): 2'-hydroxy corresponding base
  modified_base (20)..(20): deoxythymidine
  modified_base (21)..(21): 5'-thio thymidine
uuccgaauaaacuccaggctt

SEQ ID NO: 1421 - RNA, 19 nt, Artificial Sequence
  Description of Artificial Sequence: Synthetic oligonucleotide
  siRNAs to PCSK9
  modified_base (1)..(1): 2'-hydroxy corresponding base
  modified_base (2)..(2): 2'-O-methoxyethyl corresponding base
  modified_base (3)..(3): 2'-hydroxy corresponding base
  modified_base (4)..(4): 2'-O-methoxyethyl corresponding base
  modified_base (5)..(5): 2'-hydroxy corresponding base
  modified_base (6)..(6): 2'-O-methoxyethyl corresponding base
  modified_base (7)..(7): 2'-hydroxy corresponding base
  modified_base (8)..(8): 2'-O-methyl corresponding base
  modified_base (9)..(9): 2'-hydroxy corresponding base
  modified_base (10)..(10): 2'-O-methoxyethyl corresponding base
  modified_base (11)..(11): 2'-hydroxy corresponding base
  modified_base (12)..(12): 2'-O-methoxyethyl corresponding base
  modified_base (13)..(13): 2'-hydroxy corresponding base
  modified_base (14)..(14): 2'-O-methoxyethyl corresponding base
  modified_base (15)..(15): 2'-hydroxy corresponding base
  modified_base (16)..(16): 2'-O-methoxyethyl corresponding base
  modified_base (17)..(17): 2'-hydroxy corresponding base
  modified_base (18)..(18): 2'-O-methoxyethyl corresponding base
  modified_base (19)..(19): 2'-hydroxy corresponding base
gccuggaguuuauucggaa

SEQ ID NO: 1422 - DNA, 21 bp, Artificial Sequence
  Description of Artificial Sequence: Synthetic oligonucleotide
  Description of Combined DNA/RNA Molecule: Synthetic oligonucleotide
  siRNAs to PCSK9
  modified_base (1)..(1): 2'-O-methyl corresponding base
  modified_base (2)..(2): 2'-hydroxy corresponding base
  modified_base (3)..(3): 2'-O-methyl corresponding base
  modified_base (4)..(4): 2'-hydroxy corresponding base
  modified_base (5)..(5): 2'-hydroxy corresponding base
  modified_base (6)..(6): 2'-hydroxy corresponding base
  modified_base (7)..(7): 2'-hydroxy corresponding base
  modified_base (8)..(8): 2'-O-methyl corresponding base
  modified_base (9)..(9): 2'-hydroxy corresponding base
  modified_base (10)..(10): 2'-hydroxy corresponding base
  modified_base (11)..(11): 2'-hydroxy corresponding base
  modified_base (12)..(12): 2'-hydroxy corresponding base
  modified_base (13)..(13): 2'-hydroxy corresponding base
  modified_base (14)..(14): 2'-O-methyl corresponding base
  modified_base (15)..(15): 2'-O-methyl corresponding base
  modified_base (16)..(16): 2'-hydroxy corresponding base
  modified_base (17)..(17): 2'-hydroxy corresponding base
  modified_base (18)..(18): 2'-hydroxy corresponding base
  modified_base (19)..(19): 2'-hydroxy corresponding base
  modified_base (20)..(20): deoxythymidine
  modified_base (21)..(21): 5'-thio thymidine
uuccgaauaaacuccaggctt

SEQ ID NO: 1423 - RNA, 19 nt, Artificial Sequence
  Description of Artificial Sequence: Synthetic oligonucleotide
  siRNAs to PCSK9
  modified_base (1)..(1): 2'-hydroxy corresponding base
  modified_base (2)..(2): 2'-O-methoxyethyl corresponding base
  modified_base (3)..(3): 2'-hydroxy corresponding base
  modified_base (4)..(4): 2'-O-methoxyethyl corresponding base
  modified_base (5)..(5): 2'-hydroxy corresponding base
  modified_base (6)..(6): 2'-O-methoxyethyl corresponding base
  modified_base (7)..(7): 2'-hydroxy corresponding base
  modified_base (8)..(8): 2'-O-methyl corresponding base
  modified_base (9)..(9): 2'-hydroxy corresponding base
  modified_base (10)..(10): 2'-O-methoxyethyl corresponding base
  modified_base (11)..(11): 2'-hydroxy corresponding base
  modified_base (12)..(12): 2'-O-methoxyethyl corresponding base
  modified_base (13)..(13): 2'-hydroxy corresponding base
  modified_base (14)..(14): 2'-O-methoxyethyl corresponding base
  modified_base (15)..(15): 2'-hydroxy corresponding base
  modified_base (16)..(16): 2'-O-methoxyethyl corresponding base
  modified_base (17)..(17): 2'-hydroxy corresponding base
  modified_base (18)..(18): 2'-O-methoxyethyl corresponding base
  modified_base (19)..(19): 2'-hydroxy corresponding base
gccuggaguuuauucggaa

SEQ ID NO: 1424 - RNA, 21 nt, Artificial Sequence
  Description of Artificial Sequence: Synthetic oligonucleotide
  siRNAs to PCSK9
  modified_base (1)..(1): 2'-hydroxy corresponding base
  modified_base (2)..(2): 2'-hydroxy corresponding base
  modified_base (3)..(3): 2'-hydroxy corresponding base
  modified_base (4)..(4): 2'-hydroxy corresponding base
  modified_base (5)..(5): 2'-hydroxy corresponding base
  modified_base (6)..(6): 2'-O-methyl corresponding base
  modified_base (7)..(7): 2'-O-methyl corresponding base
  modified_base (8)..(8): 2'-hydroxy corresponding base
  modified_base (9)..(9): 2'-hydroxy corresponding base
  modified_base (10)..(10): 2'-O-methyl corresponding base
  modified_base (11)..(11): 2'-O-methyl corresponding base
  modified_base (12)..(12): 2'-hydroxy corresponding base
  modified_base (13)..(13): 2'-hydroxy corresponding base
  modified_base (14)..(14): 2'-hydroxy corresponding base
  modified_base (15)..(15): 2'-hydroxy corresponding base
  modified_base (16)..(16): 2'-hydroxy corresponding base
  modified_base (17)..(17): 2'-O-methyl corresponding base
  modified_base (18)..(18): 2'-O-methyl corresponding base
  modified_base (19)..(19): 2'-O-methyl corresponding base
  modified_base (20)..(20): 2'-O-methyl corresponding base 5'-monophosphorothioate
  modified_base (21)..(21): 2'-O-methyl corresponding base 5'-monophosphorothioate
uuccgaauaaacuccaggccu

SEQ ID NO: 1425 - DNA, 21 bp, Artificial Sequence
  Description of Artificial Sequence: Synthetic oligonucleotide
  Description of Combined DNA/RNA Molecule: Synthetic oligonucleotide
  siRNAs to PCSK9
  modified_base (1)..(1): 2'-hydroxy corresponding base
  modified_base (2)..(2): 2'-O-methoxyethyl corresponding base
  modified_base (3)..(3): 2'-hydroxy corresponding base
  modified_base (4)..(4): 2'-O-methoxyethyl corresponding base
  modified_base (5)..(5): 2'-hydroxy corresponding base
  modified_base (6)..(6): 2'-O-methoxyethyl corresponding base
  modified_base (7)..(7): 2'-hydroxy corresponding base
  modified_base (8)..(8): 2'-O-methoxyethyl corresponding base
  modified_base (9)..(9): 2'-hydroxy corresponding base
  modified_base (10)..(10): 2'-O-methoxyethyl corresponding base
  modified_base (11)..(11): 2'-hydroxy corresponding base
  modified_base (12)..(12): 2'-O-methoxyethyl corresponding base
  modified_base (13)..(13): 2'-hydroxy corresponding base
  modified_base (14)..(14): 2'-O-methoxyethyl corresponding base
  modified_base (15)..(15): 2'-hydroxy corresponding base
  modified_base (16)..(16): 2'-O-methoxyethyl corresponding base
  modified_base (17)..(17): 2'-hydroxy corresponding base
  modified_base (18)..(18): 2'-O-methoxyethyl corresponding base
  modified_base (19)..(19): 2'-hydroxy corresponding base
  modified_base (20)..(20): deoxythymidine
  modified_base (21)..(21): 5'-thio thymidine
gccuggaguuuauucggaatt

SEQ ID NO: 1426 - DNA, 21 bp, Artificial Sequence
  Description of Artificial Sequence: Synthetic oligonucleotide
  Description of Combined DNA/RNA Molecule: Synthetic oligonucleotide
  siRNAs to PCSK9
  modified_base (1)..(1): 2'-hydroxy corresponding base
  modified_base (2)..(2): 2'-hydroxy corresponding base
  modified_base (3)..(3): 2'-hydroxy corresponding base
  modified_base (4)..(4): 2'-hydroxy corresponding base
  modified_base (5)..(5): 2'-hydroxy corresponding base
  modified_base (6)..(6): 2'-O-methyl corresponding base
  modified_base (7)..(7): 2'-O-methyl corresponding base
  modified_base (8)..(8): 2'-hydroxy corresponding base
  modified_base (9)..(9): 2'-hydroxy corresponding base
  modified_base (10)..(10): 2'-O-methyl corresponding base
  modified_base (11)..(11): 2'-O-methyl corresponding base
  modified_base (12)..(12): 2'-hydroxy corresponding base
  modified_base (13)..(13): 2'-hydroxy corresponding base
  modified_base (14)..(14): 2'-hydroxy corresponding base
  modified_base (15)..(15): 2'-hydroxy corresponding base
  modified_base (16)..(16): 2'-hydroxy corresponding base
  modified_base (17)..(17): 2'-O-methyl corresponding base
  modified_base (18)..(18): 2'-O-methyl corresponding base
  modified_base (19)..(19): 2'-O-methyl corresponding base
  modified_base (20)..(20): deoxythymidine
  modified_base (21)..(21): 5'-thio thymidine
uuccgaauaaacuccaggctt

SEQ ID NO: 1427 - DNA, 21 bp, Artificial Sequence
  Description of Artificial Sequence: Synthetic oligonucleotide
  Description of Combined DNA/RNA Molecule: Synthetic oligonucleotide
  siRNAs to PCSK9
  modified_base (1)..(1): 2'-hydroxy corresponding base
  modified_base (2)..(2): 2'-O-methoxyethyl corresponding base
  modified_base (3)..(3): 2'-hydroxy corresponding base
  modified_base (4)..(4): 2'-O-methoxyethyl corresponding base
  modified_base (5)..(5): 2'-hydroxy corresponding base
  modified_base (6)..(6): 2'-O-methoxyethyl corresponding base
  modified_base (7)..(7): 2'-hydroxy corresponding base
  modified_base (8)..(8): 2'-O-methoxyethyl corresponding base
  modified_base (9)..(9): 2'-hydroxy corresponding base
  modified_base (10)..(10): 2'-O-methoxyethyl corresponding base
  modified_base (11)..(11): 2'-hydroxy corresponding base
  modified_base (12)..(12): 2'-O-methoxyethyl corresponding base
  modified_base (13)..(13): 2'-hydroxy corresponding base
  modified_base (14)..(14): 2'-O-methoxyethyl corresponding base
  modified_base (15)..(15): 2'-hydroxy corresponding base
  modified_base (16)..(16): 2'-O-methoxyethyl corresponding base
  modified_base (17)..(17): 2'-hydroxy corresponding base
  modified_base (18)..(18): 2'-O-methoxyethyl corresponding base
  modified_base (19)..(19): 2'-hydroxy corresponding base
  modified_base (20)..(20): deoxythymidine
  modified_base (21)..(21): 5'-thio thymidine
gccuggaguuuauucggaatt

SEQ ID NO: 1428 - DNA, 21 bp, Artificial Sequence
  Description of Artificial Sequence: Synthetic oligonucleotide
  Description of Combined DNA/RNA Molecule: Synthetic oligonucleotide
  siRNAs to PCSK9
  modified_base (1)..(1): 2'-hydroxy corresponding base
  modified_base (2)..(2): 2'-hydroxy corresponding base
  modified_base (3)..(3): 2'-hydroxy corresponding base
  modified_base (4)..(4): 2'-hydroxy corresponding base
  modified_base (5)..(5): 2'-hydroxy corresponding base
  modified_base (6)..(6): 2'-hydroxy corresponding base
  modified_base (7)..(7): 2'-hydroxy corresponding base
  modified_base (8)..(8): 2'-O-methyl corresponding base
  modified_base (9)..(9): 2'-hydroxy corresponding base
  modified_base (10)..(10): 2'-hydroxy corresponding base
  modified_base (11)..(11): 2'-hydroxy corresponding base
  modified_base (12)..(12): 2'-hydroxy corresponding base
  modified_base (13)..(13): 2'-hydroxy corresponding base
  modified_base (14)..(14): 2'-hydroxy corresponding base
  modified_base (15)..(15): 2'-O-methyl corresponding base
  modified_base (16)..(16): 2'-hydroxy corresponding base
  modified_base (17)..(17): 2'-hydroxy corresponding base
  modified_base (18)..(18): 2'-hydroxy corresponding base
  modified_base (19)..(19): 2'-hydroxy corresponding base
  modified_base (20)..(20): deoxythymidine
  modified_base (21)..(21): 5'-thio thymidine
uuccgaauaaacuccaggctt

SEQ ID NO: 1429 - DNA, 21 bp, Artificial Sequence
  Description of Artificial Sequence: Synthetic oligonucleotide
  Description of Combined DNA/RNA Molecule: Synthetic oligonucleotide
  siRNAs to PCSK9
  modified_base (1)..(1): 2'-hydroxy corresponding base
  modified_base (2)..(2): 2'-O-methoxyethyl corresponding base
  modified_base (3)..(3): 2'-hydroxy corresponding base
  modified_base (4)..(4): 2'-O-methoxyethyl corresponding base
  modified_base (5)..(5): 2'-hydroxy corresponding base
  modified_base (6)..(6): 2'-O-methoxyethyl corresponding base
  modified_base (7)..(7): 2'-hydroxy corresponding base
  modified_base (8)..(8): 2'-O-methoxyethyl corresponding base
  modified_base (9)..(9): 2'-hydroxy corresponding base
  modified_base (10)..(10): 2'-O-methoxyethyl corresponding base
  modified_base (11)..(11): 2'-hydroxy corresponding base
  modified_base (12)..(12): 2'-O-methoxyethyl corresponding base
  modified_base (13)..(13): 2'-hydroxy corresponding base
  modified_base (14)..(14): 2'-O-methoxyethyl corresponding base
  modified_base (15)..(15): 2'-hydroxy corresponding base
  modified_base (16)..(16): 2'-O-methoxyethyl corresponding base
  modified_base (17)..(17): 2'-hydroxy corresponding base
  modified_base (18)..(18): 2'-O-methoxyethyl corresponding base
  modified_base (19)..(19): 2'-hydroxy corresponding base
  modified_base (20)..(20): deoxythymidine
  modified_base (21)..(21): 5'-thio thymidine
gccuggaguuuauucggaatt

SEQ ID NO: 1430 - DNA, 21 bp, Artificial Sequence
  Description of Artificial Sequence: Synthetic oligonucleotide
  Description of Combined DNA/RNA Molecule: Synthetic oligonucleotide
  siRNAs to PCSK9
  modified_base (1)..(1): 2'-hydroxy corresponding base
  modified_base (2)..(2): 2'-hydroxy corresponding base
  modified_base (3)..(3): 2'-hydroxy corresponding base
  modified_base (4)..(4): 2'-hydroxy corresponding base
  modified_base (5)..(5): 2'-hydroxy corresponding base
  modified_base (6)..(6): 2'-hydroxy corresponding base
  modified_base (7)..(7): 2'-hydroxy corresponding base
  modified_base (8)..(8): 2'-hydroxy corresponding base
  modified_base (9)..(9): 2'-hydroxy corresponding base
  modified_base (10)..(10): 2'-hydroxy corresponding base
  modified_base (11)..(11): 2'-hydroxy corresponding base
  modified_base (12)..(12): 2'-hydroxy corresponding base
  modified_base (13)..(13): 2'-hydroxy corresponding base
  modified_base (14)..(14): 2'-hydroxy corresponding base
  modified_base (15)..(15): 2'-hydroxy corresponding base
  modified_base (16)..(16): 2'-hydroxy corresponding base
  modified_base (17)..(17): 2'-hydroxy corresponding base
  modified_base (18)..(18): 2'-hydroxy corresponding base
  modified_base (19)..(19): 2'-hydroxy corresponding base
  modified_base (20)..(20): deoxythymidine
  modified_base (21)..(21): 5'-thio thymidine
uuccgaauaaacuccaggctt

SEQ ID NO: 1431 - DNA, 21 bp, Artificial Sequence
  Description of Artificial Sequence: Synthetic oligonucleotide
  Description of Combined DNA/RNA Molecule: Synthetic oligonucleotide
  siRNAs to PCSK9
  modified_base (1)..(1): 2'-hydroxy corresponding base
  modified_base (2)..(2): 2'-O-methoxyethyl corresponding base
  modified_base (3)..(3): 2'-O-methoxyethyl corresponding base
  modified_base (4)..(4): 2'-O-methoxyethyl corresponding base
  modified_base (5)..(5): 2'-hydroxy corresponding base
  modified_base (6)..(6): 2'-hydroxy corresponding base
  modified_base (7)..(7): 2'-hydroxy corresponding base
  modified_base (8)..(8): 2'-hydroxy corresponding base
  modified_base (9)..(9): 2'-O-methoxyethyl corresponding base
  modified_base (10)..(10): 2'-O-methoxyethyl corresponding base
  modified_base (11)..(11): 2'-O-methoxyethyl corresponding base
  modified_base (12)..(12): 2'-hydroxy corresponding base
  modified_base (13)..(13): 2'-O-methoxyethyl corresponding base
  modified_base (14)..(14): 2'-O-methoxyethyl corresponding base
  modified_base (15)..(15): 2'-O-methoxyethyl corresponding base
  modified_base (16)..(16): 2'-hydroxy corresponding base
  modified_base (17)..(17): 2'-hydroxy corresponding base
  modified_base (18)..(18): 2'-hydroxy corresponding base
  modified_base (19)..(19): 2'-hydroxy corresponding base
  modified_base (20)..(20): deoxythymidine
  modified_base (21)..(21): 5'-thio thymidine
gccuggaguuuauucggaatt

SEQ ID NO: 1432 - DNA, 21 bp, Artificial Sequence
  Description of Artificial Sequence: Synthetic oligonucleotide
  Description of Combined DNA/RNA Molecule: Synthetic oligonucleotide
  siRNAs to PCSK9
  modified_base (1)..(1): 2'-hydroxy corresponding base
  modified_base (2)..(2): 2'-hydroxy corresponding base
  modified_base (3)..(3): 2'-hydroxy corresponding base
  modified_base (4)..(4): 2'-hydroxy corresponding base
  modified_base (5)..(5): 2'-hydroxy corresponding base
  modified_base (6)..(6): 2'-O-methyl corresponding base
  modified_base (7)..(7): 2'-O-methyl corresponding base
  modified_base (8)..(8): 2'-hydroxy corresponding base
  modified_base (9)..(9): 2'-hydroxy corresponding base
  modified_base (10)..(10): 2'-O-methyl corresponding base
  modified_base (11)..(11): 2'-O-methyl corresponding base
  modified_base (12)..(12): 2'-hydroxy corresponding base
  modified_base (13)..(13): 2'-hydroxy corresponding base
  modified_base (14)..(14): 2'-hydroxy corresponding base
  modified_base (15)..(15): 2'-hydroxy corresponding base
  modified_base (16)..(16): 2'-hydroxy corresponding base
  modified_base (17)..(17): 2'-O-methyl corresponding base
  modified_base (18)..(18): 2'-O-methyl corresponding base
  modified_base (19)..(19): 2'-O-methyl corresponding base
  modified_base (20)..(20): deoxythymidine
  modified_base (21)..(21): 5'-thio thymidine
uuccgaauaaacuccaggctt

SEQ ID NO: 1433 - DNA, 21 bp, Artificial Sequence
  Description of Artificial Sequence: Synthetic oligonucleotide
  Description of Combined DNA/RNA Molecule: Synthetic oligonucleotide
  siRNAs to PCSK9
  modified_base (1)..(1): 2'-hydroxy corresponding base
  modified_base (2)..(2): 2'-O-methoxyethyl corresponding base
  modified_base (3)..(3): 2'-O-methoxyethyl corresponding base
  modified_base (4)..(4): 2'-O-methoxyethyl corresponding base
  modified_base (5)..(5): 2'-hydroxy corresponding base
  modified_base (6)..(6): 2'-hydroxy corresponding base
  modified_base (7)..(7): 2'-hydroxy corresponding base
  modified_base (8)..(8): 2'-hydroxy corresponding base
  modified_base (9)..(9): 2'-O-methoxyethyl corresponding base
  modified_base (10)..(10): 2'-O-methoxyethyl corresponding base
  modified_base (11)..(11): 2'-O-methoxyethyl corresponding base
  modified_base (12)..(12): 2'-hydroxy corresponding base
  modified_base (13)..(13): 2'-O-methoxyethyl corresponding base
  modified_base (14)..(14): 2'-O-methoxyethyl corresponding base
  modified_base (15)..(15): 2'-O-methoxyethyl corresponding base
  modified_base (16)..(16): 2'-hydroxy corresponding base
  modified_base (17)..(17): 2'-hydroxy corresponding base
  modified_base (18)..(18): 2'-hydroxy corresponding base
  modified_base (19)..(19): 2'-hydroxy corresponding base
  modified_base (20)..(20): deoxythymidine
  modified_base (21)..(21): 5'-thio thymidine
gccuggaguuuauucggaatt

SEQ ID NO: 1434 - DNA, 21 bp, Artificial Sequence
  Description of Artificial Sequence: Synthetic oligonucleotide
  Description of Combined DNA/RNA Molecule: Synthetic oligonucleotide
  siRNAs to PCSK9
  modified_base (1)..(1): 2'-hydroxy corresponding base
  modified_base (2)..(2): 2'-hydroxy corresponding base
  modified_base (3)..(3): 2'-hydroxy corresponding base
  modified_base (4)..(4): 2'-hydroxy corresponding base
  modified_base (5)..(5): 2'-hydroxy corresponding base
  modified_base (6)..(6): 2'-hydroxy corresponding base
  modified_base (7)..(7): 2'-hydroxy corresponding base
  modified_base (8)..(8): 2'-O-methyl corresponding base
  modified_base (9)..(9): 2'-hydroxy corresponding base
  modified_base (10)..(10): 2'-hydroxy corresponding base
  modified_base (11)..(11): 2'-hydroxy corresponding base
  modified_base (12)..(12): 2'-hydroxy corresponding base
  modified_base (13)..(13): 2'-hydroxy corresponding base
  modified_base (14)..(14): 2'-hydroxy corresponding base
  modified_base (15)..(15): 2'-O-methyl corresponding base
  modified_base (16)..(16): 2'-hydroxy corresponding base
  modified_base (17)..(17): 2'-hydroxy corresponding base
  modified_base (18)..(18): 2'-hydroxy corresponding base
  modified_base (19)..(19): 2'-hydroxy corresponding base
  modified_base (20)..(20): deoxythymidine
  modified_base (21)..(21): 5'-thio thymidine
uuccgaauaaacuccaggctt

SEQ ID NO: 1435 - DNA, 21 bp, Artificial Sequence
  Description of Artificial Sequence: Synthetic oligonucleotide
  Description of Combined DNA/RNA Molecule: Synthetic oligonucleotide
  siRNAs to PCSK9
  modified_base (1)..(1): 2'-hydroxy corresponding base
  modified_base (2)..(2): 2'-O-methoxyethyl corresponding base
  modified_base (3)..(3): 2'-O-methoxyethyl corresponding base
  modified_base (4)..(4): 2'-O-methoxyethyl corresponding base
  modified_base (5)..(5): 2'-hydroxy corresponding base
  modified_base (6)..(6): 2'-hydroxy corresponding base
  modified_base (7)..(7): 2'-hydroxy corresponding base
  modified_base (8)..(8): 2'-hydroxy corresponding base
  modified_base (9)..(9): 2'-O-methoxyethyl corresponding base
  modified_base (10)..(10): 2'-O-methoxyethyl corresponding base
  modified_base (11)..(11): 2'-O-methoxyethyl corresponding base
  modified_base (12)..(12): 2'-hydroxy corresponding base
  modified_base (13)..(13): 2'-O-methoxyethyl corresponding base
  modified_base (14)..(14): 2'-O-methoxyethyl corresponding base
  modified_base (15)..(15): 2'-O-methoxyethyl corresponding base
  modified_base (16)..(16): 2'-hydroxy corresponding base
  modified_base (17)..(17): 2'-hydroxy corresponding base
  modified_base (18)..(18): 2'-hydroxy corresponding base
  modified_base (19)..(19): 2'-hydroxy corresponding base
  modified_base (20)..(20): deoxythymidine
  modified_base (21)..(21): 5'-thio thymidine
gccuggaguuuauucggaatt

SEQ ID NO: 1436 - DNA, 21 bp, Artificial Sequence
  Description of Artificial Sequence: Synthetic oligonucleotide
  Description of Combined DNA/RNA Molecule: Synthetic oligonucleotide
  siRNAs to PCSK9
  modified_base (1)..(1): 2'-hydroxy corresponding base
  modified_base (2)..(2): 2'-hydroxy corresponding base
  modified_base (3)..(3): 2'-hydroxy corresponding base
  modified_base (4)..(4): 2'-hydroxy corresponding base
  modified_base (5)..(5): 2'-hydroxy corresponding base
  modified_base (6)..(6): 2'-hydroxy corresponding base
  modified_base (7)..(7): 2'-hydroxy corresponding base
  modified_base (8)..(8): 2'-hydroxy corresponding base
  modified_base (9)..(9): 2'-hydroxy corresponding base
  modified_base (10)..(10): 2'-hydroxy corresponding base
  modified_base (11)..(11): 2'-hydroxy corresponding base
  modified_base (12)..(12): 2'-hydroxy corresponding base
  modified_base (13)..(13): 2'-hydroxy corresponding base
  modified_base (14)..(14): 2'-hydroxy corresponding base
  modified_base (15)..(15): 2'-hydroxy corresponding base
  modified_base (16)..(16): 2'-hydroxy corresponding base
  modified_base (17)..(17): 2'-hydroxy corresponding base
  modified_base (18)..(18): 2'-hydroxy corresponding base
  modified_base (19)..(19): 2'-hydroxy corresponding base
  modified_base (20)..(20): deoxythymidine
  modified_base (21)..(21): 5'-thio thymidine
uuccgaauaaacuccaggctt

SEQ ID NO: 1437 - DNA, 21 bp, Artificial Sequence
  Description of Artificial Sequence: Synthetic oligonucleotide
  Description of Combined DNA/RNA Molecule: Synthetic oligonucleotide
  siRNAs to PCSK9
  modified_base (1)..(1): 2'-hydroxy corresponding base
  modified_base (2)..(2): 2'-O-methoxyethyl corresponding base
  modified_base (3)..(3): 2'-O-methoxyethyl corresponding base
  modified_base (4)..(4): 2'-O-methoxyethyl corresponding base
  modified_base (5)..(5): 2'-hydroxy corresponding base
  modified_base (6)..(6): 2'-hydroxy corresponding base
  modified_base (7)..(7): 2'-hydroxy corresponding base
  modified_base (8)..(8): 2'-hydroxy corresponding base
  modified_base (9)..(9): 2'-O-methoxyethyl corresponding base
  modified_base (10)..(10): 2'-O-methoxyethyl corresponding base
  modified_base (11)..(11): 2'-O-methoxyethyl corresponding base
  modified_base (12)..(12): 2'-hydroxy corresponding base
  modified_base (13)..(13): 2'-O-methoxyethyl corresponding base
  modified_base (14)..(14): 2'-O-methoxyethyl corresponding base
  modified_base (15)..(15): 2'-O-methoxyethyl corresponding base
  modified_base (16)..(16): 2'-hydroxy corresponding base
  modified_base (17)..(17): 2'-hydroxy corresponding base
  modified_base (18)..(18): 2'-hydroxy corresponding base
  modified_base (19)..(19): 2'-hydroxy corresponding base
  modified_base (20)..(20): deoxythymidine
  modified_base (21)..(21): 5'-thio thymidine
gccuggaguuuauucggaatt

SEQ ID NO: 1438 - DNA, 21 bp, Artificial Sequence
  Description of Artificial Sequence: Synthetic oligonucleotide
  Description of Combined DNA/RNA Molecule: Synthetic oligonucleotide
  siRNAs to PCSK9
  modified_base (1)..(1): 2'-deoxy-2'-fluoro corresponding base
  modified_base (2)..(2): 2'-deoxy-2'-fluoro corresponding base
  modified_base (3)..(3): 2'-deoxy-2'-fluoro corresponding base
  modified_base (4)..(4): 2'-deoxy-2'-fluoro corresponding base
  modified_base (5)..(5): 2'-hydroxy corresponding base
  modified_base (6)..(6): 2'-hydroxy corresponding base
  modified_base (7)..(7): 2'-hydroxy corresponding base
  modified_base (8)..(8): 2'-deoxy-2'-fluoro corresponding base
  modified_base (9)..(9): 2'-hydroxy corresponding base
  modified_base (10)..(10): 2'-hydroxy corresponding base
  modified_base (11)..(11): 2'-hydroxy corresponding base
  modified_base (12)..(12): 2'-deoxy-2'-fluoro corresponding base
  modified_base (13)..(13): 2'-deoxy-2'-fluoro corresponding base
  modified_base (14)..(14): 2'-deoxy-2'-fluoro corresponding base
  modified_base (15)..(15): 2'-deoxy-2'-fluoro corresponding base
  modified_base (16)..(16): 2'-hydroxy corresponding base
  modified_base (17)..(17): 2'-hydroxy corresponding base
  modified_base (18)..(18): 2'-hydroxy corresponding base
  modified_base (19)..(19): 2'-deoxy-2'-fluoro corresponding base
  modified_base (20)..(20): deoxythymidine
  modified_base (21)..(21): 5'-thio thymidine
uuccgaauaaacuccaggctt

SEQ ID NO: 1439 - DNA, 21 bp, Artificial Sequence
  Description of Artificial Sequence: Synthetic oligonucleotide
  Description of Combined DNA/RNA Molecule: Synthetic oligonucleotide
  siRNAs to PCSK9
  modified_base (1)..(1): 2'-hydroxy corresponding base
  modified_base (2)..(2): 2'-O-methoxyethyl corresponding base
  modified_base (3)..(3): 2'-O-methoxyethyl corresponding base
  modified_base (4)..(4): 2'-O-methoxyethyl corresponding base
  modified_base (5)..(5): 2'-hydroxy corresponding base
  modified_base (6)..(6): 2'-hydroxy corresponding base
  modified_base (7)..(7): 2'-hydroxy corresponding base
  modified_base (8)..(8): 2'-hydroxy corresponding base
  modified_base (9)..(9): 2'-O-methoxyethyl corresponding base
  modified_base (10)..(10): 2'-O-methoxyethyl corresponding base
  modified_base (11)..(11): 2'-O-methoxyethyl corresponding base
  modified_base (12)..(12): 2'-hydroxy corresponding base
  modified_base (13)..(13): 2'-O-methoxyethyl corresponding base
  modified_base (14)..(14): 2'-O-methoxyethyl corresponding base
  modified_base (15)..(15): 2'-O-methoxyethyl corresponding base
  modified_base (16)..(16): 2'-hydroxy corresponding base
  modified_base (17)..(17): 2'-hydroxy corresponding base
  modified_base (18)..(18): 2'-hydroxy corresponding base
  modified_base (19)..(19): 2'-hydroxy corresponding base
  modified_base (20)..(20): deoxythymidine
  modified_base (21)..(21): 5'-thio thymidine
gccuggaguuuauucggaatt

SEQ ID NO: 1440 - RNA, 21 nt, Artificial Sequence
  Description of Artificial Sequence: Synthetic oligonucleotide
  siRNAs to PCSK9
  modified_base (1)..(1): 2'-deoxy-2'-fluoro corresponding base
  modified_base (2)..(2): 2'-deoxy-2'-fluoro corresponding base
  modified_base (3)..(3): 2'-deoxy-2'-fluoro corresponding base
  modified_base (4)..(4): 2'-deoxy-2'-fluoro corresponding base
  modified_base (5)..(5): 2'-hydroxy corresponding base
  modified_base (6)..(6): 2'-hydroxy corresponding base
  modified_base (7)..(7): 2'-hydroxy corresponding base
  modified_base (8)..(8): 2'-deoxy-2'-fluoro corresponding base
  modified_base (9)..(9): 2'-hydroxy corresponding base
  modified_base (10)..(10): 2'-hydroxy corresponding base
  modified_base (11)..(11): 2'-hydroxy corresponding base
  modified_base (12)..(12): 2'-deoxy-2'-fluoro corresponding base
  modified_base (13)..(13): 2'-deoxy-2'-fluoro corresponding base
  modified_base (14)..(14): 2'-deoxy-2'-fluoro corresponding base
  modified_base (15)..(15): 2'-deoxy-2'-fluoro corresponding base
  modified_base (16)..(16): 2'-hydroxy corresponding base
  modified_base (17)..(17): 2'-hydroxy corresponding base
  modified_base (18)..(18): 2'-hydroxy corresponding base
  modified_base (19)..(19): 2'-deoxy-2'-fluoro corresponding base
  modified_base (20)..(20): 2'-deoxy-2'-fluoro corresponding base 5'-monophosphorothioate
  modified_base (21)..(21): 2'-deoxy-2'-fluoro corresponding base 5'-monophosphorothioate
uuccgaauaaacuccaggccu

SEQ ID NO: 1441 - DNA, 21 bp, Artificial Sequence
  Description of Artificial Sequence: Synthetic oligonucleotide
  Description of Combined DNA/RNA Molecule: Synthetic oligonucleotide
  siRNAs to PCSK9
  modified_base (1)..(1): 2'-hydroxy corresponding base
  modified_base (2)..(2): 2'-O-methoxyethyl corresponding base
  modified_base (3)..(3): 2'-O-methoxyethyl corresponding base
  modified_base (4)..(4): 2'-O-methoxyethyl corresponding base
  modified_base (5)..(5): 2'-hydroxy corresponding base
  modified_base (6)..(6): 2'-hydroxy corresponding base
  modified_base (7)..(7): 2'-hydroxy corresponding base
  modified_base (8)..(8): 2'-hydroxy corresponding base
  modified_base (9)..(9): 2'-O-methoxyethyl corresponding base
  modified_base (10)..(10): 2'-O-methoxyethyl corresponding base
  modified_base (11)..(11): 2'-O-methoxyethyl corresponding base
  modified_base (12)..(12): 2'-hydroxy corresponding base
  modified_base (13)..(13): 2'-O-methoxyethyl corresponding base
  modified_base (14)..(14): 2'-O-methoxyethyl corresponding base
  modified_base (15)..(15): 2'-O-methoxyethyl corresponding base
  modified_base (16)..(16): 2'-hydroxy corresponding base
  modified_base (17)..(17): 2'-hydroxy corresponding base
  modified_base (18)..(18): 2'-hydroxy corresponding base
  modified_base (19)..(19): 2'-hydroxy corresponding base
  modified_base (20)..(20): deoxythymidine
  modified_base (21)..(21): 5'-thio thymidine
gccuggaguuuauucggaatt

SEQ ID NO: 1442 - RNA, 21 nt, Artificial Sequence
  Description of Artificial Sequence: Synthetic oligonucleotide
  siRNAs to PCSK9
  modified_base (1)..(1): 2'-O-methyl corresponding base
  modified_base (2)..(2): 2'-deoxy-2'-fluoro corresponding base
  modified_base (3)..(3): 2'-O-methyl corresponding base
  modified_base (4)..(4): 2'-deoxy-2'-fluoro corresponding base
  modified_base (5)..(5): 2'-O-methyl corresponding base
  modified_base (6)..(6): 2'-deoxy-2'-fluoro corresponding base
  modified_base (7)..(7): 2'-O-methyl corresponding base
  modified_base (8)..(8): 2'-deoxy-2'-fluoro corresponding base
  modified_base (9)..(9): 2'-O-methyl corresponding base
  modified_base (10)..(10): 2'-deoxy-2'-fluoro corresponding base
  modified_base (11)..(11): 2'-O-methyl corresponding base
  modified_base (12)..(12): 2'-deoxy-2'-fluoro corresponding base
  modified_base (13)..(13): 2'-O-methyl corresponding base
  modified_base (14)..(14): 2'-deoxy-2'-fluoro corresponding base
  modified_base (15)..(15): 2'-O-methyl corresponding base
  modified_base (16)..(16): 2'-deoxy-2'-fluoro corresponding base
  modified_base (17)..(17): 2'-O-methyl corresponding base
  modified_base (18)..(18): 2'-deoxy-2'-fluoro corresponding base
  modified_base (19)..(19): 2'-O-methyl corresponding base
  modified_base (20)..(20): 2'-deoxy-2'-fluoro corresponding base 5'-monophosphorothioate
  modified_base (21)..(21): 2'-O-methyl corresponding base 5'-monophosphorothioate
uuccgaauaaacuccaggccu

SEQ ID NO: 1443 - DNA, 21 bp, Artificial Sequence
  Description of Artificial Sequence: Synthetic oligonucleotide
  Description of Combined DNA/RNA Molecule: Synthetic oligonucleotide
  siRNAs to PCSK9
  modified_base (1)..(1): 2'-hydroxy corresponding base
  modified_base (2)..(2): 2'-O-methoxyethyl corresponding base
  modified_base (3)..(3): 2'-O-methoxyethyl corresponding base
  modified_base (4)..(4): 2'-O-methoxyethyl corresponding base
  modified_base (5)..(5): 2'-hydroxy corresponding base
  modified_base (6)..(6): 2'-hydroxy corresponding base
  modified_base (7)..(7): 2'-hydroxy corresponding base
  modified_base (8)..(8): 2'-hydroxy corresponding base
  modified_base (9)..(9): 2'-O-methoxyethyl corresponding base
  modified_base (10)..(10): 2'-O-methoxyethyl corresponding base
  modified_base (11)..(11): 2'-O-methoxyethyl corresponding base
  modified_base (12)..(12): 2'-hydroxy corresponding base
  modified_base (13)..(13): 2'-O-methoxyethyl corresponding base
  modified_base (14)..(14): 2'-O-methoxyethyl corresponding base
  modified_base (15)..(15): 2'-O-methoxyethyl corresponding base
  modified_base (16)..(16): 2'-hydroxy corresponding base
  modified_base (17)..(17): 2'-hydroxy corresponding base
  modified_base (18)..(18): 2'-hydroxy corresponding base
  modified_base (19)..(19): 2'-hydroxy corresponding base
  modified_base (20)..(20): deoxythymidine
  modified_base (21)..(21): 5'-thio thymidine
gccuggaguuuauucggaatt

SEQ ID NO: 1444 - DNA, 21 bp, Artificial Sequence
  Description of Artificial Sequence: Synthetic oligonucleotide
  Description of Combined DNA/RNA Molecule: Synthetic oligonucleotide
  siRNAs to PCSK9
  modified_base (1)..(1): 2'-hydroxy corresponding base
  modified_base (2)..(2): 2'-hydroxy corresponding base
  modified_base (3)..(3): 2'-hydroxy corresponding base
  modified_base (4)..(4): 2'-hydroxy corresponding base
  modified_base (5)..(5): 2'-hydroxy corresponding base
  modified_base (6)..(6): 2'-hydroxy corresponding base
  modified_base (7)..(7): 2'-hydroxy corresponding base
  modified_base (8)..(8): 2'-hydroxy corresponding base
  modified_base (9)..(9): 2'-hydroxy corresponding base
  modified_base (10)..(10): 2'-hydroxy corresponding base
  modified_base (11)..(11): 2'-hydroxy corresponding base
  modified_base (12)..(12): 2'-hydroxy corresponding base
  modified_base (13)..(13): 2'-hydroxy corresponding base
  modified_base (14)..(14): 2'-hydroxy corresponding base
  modified_base (15)..(15): 2'-hydroxy corresponding base
  modified_base (16)..(16): 2'-hydroxy corresponding base
  modified_base (17)..(17): 2'-hydroxy corresponding base
  modified_base (18)..(18): 2'-hydroxy corresponding base
  modified_base (19)..(19): 2'-hydroxy corresponding base
  modified_base (20)..(20): deoxythymidine
  modified_base (21)..(21): 5'-thio thymidine
uuccgaauaaacuccaggctt

SEQ ID NO: 1445 - DNA, 21 bp, Artificial Sequence
  Description of Artificial Sequence: Synthetic oligonucleotide
  Description of Combined DNA/RNA Molecule: Synthetic oligonucleotide
  siRNAs to PCSK9
  modified_base (1)..(1): 2'-hydroxy corresponding base
  modified_base (2)..(2): 2'-deoxy-2'-fluoro corresponding base
  modified_base (3)..(3): 2'-deoxy-2'-fluoro corresponding base
  modified_base (4)..(4): 2'-deoxy-2'-fluoro corresponding base
  modified_base (5)..(5): 2'-hydroxy corresponding base
  modified_base (6)..(6): 2'-hydroxy corresponding base
  modified_base (7)..(7): 2'-hydroxy corresponding base
  modified_base (8)..(8): 2'-hydroxy corresponding base
  modified_base (9)..(9): 2'-deoxy-2'-fluoro corresponding base
  modified_base (10)..(10): 2'-deoxy-2'-fluoro corresponding base
  modified_base (11)..(11): 2'-deoxy-2'-fluoro corresponding base
  modified_base (12)..(12): 2'-hydroxy corresponding base
  modified_base (13)..(13): 2'-deoxy-2'-fluoro corresponding base
  modified_base (14)..(14): 2'-deoxy-2'-fluoro corresponding base
  modified_base (15)..(15): 2'-deoxy-2'-fluoro corresponding base
  modified_base (16)..(16): 2'-hydroxy corresponding base
  modified_base (17)..(17): 2'-hydroxy corresponding base
  modified_base (18)..(18): 2'-hydroxy corresponding base
  modified_base (19)..(19): 2'-hydroxy corresponding base
  modified_base (20)..(20): deoxythymidine
  modified_base (21)..(21): 5'-thio thymidine
gccuggaguuuauucggaatt

SEQ ID NO: 1446 - DNA, 21 bp, Artificial Sequence
  Description of Artificial Sequence: Synthetic oligonucleotide
  Description of Combined DNA/RNA Molecule: Synthetic oligonucleotide
  siRNAs to PCSK9
  modified_base (1)..(1): 2'-deoxy-2'-fluoro corresponding base
  modified_base (2)..(2): 2'-deoxy-2'-fluoro corresponding base
  modified_base (3)..(3): 2'-deoxy-2'-fluoro corresponding base
  modified_base (4)..(4): 2'-deoxy-2'-fluoro corresponding base
  modified_base (5)..(5): 2'-hydroxy corresponding base
  modified_base (6)..(6): 2'-hydroxy corresponding base
  modified_base (7)..(7): 2'-hydroxy corresponding base
  modified_base (8)..(8): 2'-deoxy-2'-fluoro corresponding base
  modified_base (9)..(9): 2'-hydroxy corresponding base
  modified_base (10)..(10): 2'-hydroxy corresponding base
  modified_base (11)..(11): 2'-hydroxy corresponding base
  modified_base (12)..(12): 2'-deoxy-2'-fluoro corresponding base
  modified_base (13)..(13): 2'-deoxy-2'-fluoro corresponding base
  modified_base (14)..(14): 2'-deoxy-2'-fluoro corresponding base
  modified_base (15)..(15): 2'-deoxy-2'-fluoro corresponding base
  modified_base (16)..(16): 2'-hydroxy corresponding base
  modified_base (17)..(17): 2'-hydroxy corresponding base
  modified_base (18)..(18): 2'-hydroxy corresponding base
  modified_base (19)..(19): 2'-deoxy-2'-fluoro corresponding base
  modified_base (20)..(20): deoxythymidine
  modified_base (21)..(21): 5'-thio thymidine
uuccgaauaaacuccaggctt

SEQ ID NO: 1447 - DNA, 21 bp, Artificial Sequence
  Description of Artificial Sequence: Synthetic oligonucleotide
  Description of Combined DNA/RNA Molecule: Synthetic oligonucleotide
  siRNAs to PCSK9
  modified_base (1)..(1): 2'-hydroxy corresponding base
  modified_base (2)..(2): 2'-deoxy-2'-fluoro corresponding base
  modified_base (3)..(3): 2'-deoxy-2'-fluoro corresponding base
  modified_base (4)..(4): 2'-deoxy-2'-fluoro corresponding base
  modified_base (5)..(5): 2'-hydroxy corresponding base
  modified_base (6)..(6): 2'-hydroxy corresponding base
  modified_base (7)..(7): 2'-hydroxy corresponding base
  modified_base (8)..(8): 2'-hydroxy corresponding base
  modified_base (9)..(9): 2'-deoxy-2'-fluoro corresponding base
  modified_base (10)..(10): 2'-deoxy-2'-fluoro corresponding base
  modified_base (11)..(11): 2'-deoxy-2'-fluoro corresponding base
  modified_base (12)..(12): 2'-hydroxy corresponding base
  modified_base (13)..(13): 2'-deoxy-2'-fluoro corresponding base
  modified_base (14)..(14): 2'-deoxy-2'-fluoro corresponding base
  modified_base (15)..(15): 2'-deoxy-2'-fluoro corresponding base
  modified_base (16)..(16): 2'-hydroxy corresponding base
  modified_base (17)..(17): 2'-hydroxy corresponding base
  modified_base (18)..(18): 2'-hydroxy corresponding base
  modified_base (19)..(19): 2'-hydroxy corresponding base
  modified_base (20)..(20): deoxythymidine
  modified_base (21)..(21): 5'-thio thymidine
gccuggaguuuauucggaatt

SEQ ID NO: 1448 - DNA, 21 bp, Artificial Sequence
  Description of Artificial Sequence: Synthetic oligonucleotide
  Description of Combined DNA/RNA Molecule: Synthetic oligonucleotide
  siRNAs to PCSK9
  modified_base (1)..(1): 2'-hydroxy corresponding base
  modified_base (2)..(2): 2'-hydroxy corresponding base
  modified_base (3)..(3): 2'-hydroxy corresponding base
  modified_base (4)..(4): 2'-hydroxy corresponding base
  modified_base (5)..(5): 2'-hydroxy corresponding base
  modified_base (6)..(6): 2'-hydroxy corresponding base
  modified_base (7)..(7): 2'-hydroxy corresponding base
  modified_base (8)..(8): 2'-hydroxy corresponding base
  modified_base (9)..(9): 2'-hydroxy corresponding base
  modified_base (10)..(10): 2'-hydroxy corresponding base
  modified_base (11)..(11): 2'-hydroxy corresponding base
  modified_base (12)..(12): 2'-hydroxy corresponding base
  modified_base (13)..(13): 2'-hydroxy corresponding base
  modified_base (14)..(14): 2'-hydroxy corresponding base
  modified_base (15)..(15): 2'-hydroxy corresponding base
  modified_base (16)..(16): 2'-hydroxy corresponding base
  modified_base (17)..(17): 2'-hydroxy corresponding base
  modified_base (18)..(18): 2'-hydroxy corresponding base
  modified_base (19)..(19): 2'-hydroxy corresponding base
  modified_base (20)..(20): deoxythymidine
  modified_base (21)..(21): 5'-thio thymidine
uuccgaauaaacuccaggctt

SEQ ID NO: 1449 - DNA, 21 bp, Artificial Sequence
  Description of Artificial Sequence: Synthetic oligonucleotide
  Description of Combined DNA/RNA Molecule: Synthetic oligonucleotide
  siRNAs to PCSK9
  modified_base (1)..(1): 2'-hydroxy corresponding base
  modified_base (2)..(2): 2'-deoxy-2'-fluoro corresponding base
  modified_base (3)..(3): 2'-deoxy-2'-fluoro corresponding base
  modified_base (4)..(4): 2'-deoxy-2'-fluoro corresponding base
  modified_base (5)..(5): 2'-hydroxy corresponding base
  modified_base (6)..(6): 2'-hydroxy corresponding base
  modified_base (7)..(7): 2'-hydroxy corresponding base
  modified_base (8)..(8): 2'-hydroxy corresponding base
  modified_base (9)..(9): 2'-deoxy-2'-fluoro corresponding base
  modified_base (10)..(10): 2'-deoxy-2'-fluoro corresponding base
  modified_base (11)..(11): 2'-deoxy-2'-fluoro corresponding base
  modified_base (12)..(12): 2'-hydroxy corresponding base
  modified_base (13)..(13): 2'-deoxy-2'-fluoro corresponding base
  modified_base (14)..(14): 2'-deoxy-2'-fluoro corresponding base
  modified_base (15)..(15): 2'-deoxy-2'-fluoro corresponding base
  modified_base (16)..(16): 2'-hydroxy corresponding base
  modified_base (17)..(17): 2'-hydroxy corresponding base
  modified_base (18)..(18): 2'-hydroxy corresponding base
  modified_base (19)..(19): 2'-hydroxy corresponding base
  modified_base (20)..(20): deoxythymidine
  modified_base (21)..(21): 5'-thio thymidine
gccuggaguuuauucggaatt

SEQ ID NO: 1450 - DNA, 21 bp, Artificial Sequence
  Description of Artificial Sequence: Synthetic oligonucleotide
  Description of Combined DNA/RNA Molecule: Synthetic oligonucleotide
  siRNAs to PCSK9
  modified_base (1)..(1): 2'-O-methyl corresponding base
  modified_base (2)..(2): 2'-hydroxy corresponding base
  modified_base (3)..(3): 2'-O-methyl corresponding base
  modified_base (4)..(4): 2'-hydroxy corresponding base
  modified_base (5)..(5): 2'-hydroxy corresponding base
  modified_base (6)..(6): 2'-hydroxy corresponding base
  modified_base (7)..(7): 2'-hydroxy corresponding base
  modified_base (8)..(8): 2'-O-methyl corresponding base
  modified_base (9)..(9): 2'-hydroxy corresponding base
  modified_base (10)..(10): 2'-hydroxy corresponding base
  modified_base (11)..(11): 2'-hydroxy corresponding base
  modified_base (12)..(12): 2'-hydroxy corresponding base
  modified_base (13)..(13): 2'-hydroxy corresponding base
  modified_base (14)..(14): 2'-O-methyl corresponding base
  modified_base (15)..(15): 2'-O-methyl corresponding base
  modified_base (16)..(16): 2'-hydroxy corresponding base
  modified_base (17)..(17): 2'-hydroxy corresponding base
  modified_base (18)..(18): 2'-hydroxy corresponding base
  modified_base (19)..(19): 2'-hydroxy corresponding base
  modified_base (20)..(20): deoxythymidine
  modified_base (21)..(21): 5'-thio thymidine
uuccgaauaaacuccaggctt

SEQ ID NO: 1451 - DNA, 21 bp, Artificial Sequence
  Description of Artificial Sequence: Synthetic oligonucleotide
  Description of Combined DNA/RNA Molecule: Synthetic oligonucleotide
  siRNAs to PCSK9
  modified_base (1)..(1): 2'-hydroxy corresponding base
  modified_base (2)..(2): 2'-deoxy-2'-fluoro corresponding base
  modified_base (3)..(3): 2'-deoxy-2'-fluoro corresponding base
  modified_base (4)..(4): 2'-deoxy-2'-fluoro corresponding base
  modified_base (5)..(5): 2'-hydroxy corresponding base
  modified_base (6)..(6): 2'-hydroxy corresponding base
  modified_base (7)..(7): 2'-hydroxy corresponding base
  modified_base (8)..(8): 2'-hydroxy corresponding base
  modified_base (9)..(9): 2'-deoxy-2'-fluoro corresponding base
  modified_base (10)..(10): 2'-deoxy-2'-fluoro corresponding base
  modified_base (11)..(11): 2'-deoxy-2'-fluoro corresponding base
  modified_base (12)..(12): 2'-hydroxy corresponding base
  modified_base (13)..(13): 2'-deoxy-2'-fluoro corresponding base
  modified_base (14)..(14): 2'-deoxy-2'-fluoro corresponding base
  modified_base (15)..(15): 2'-deoxy-2'-fluoro corresponding base
  modified_base (16)..(16): 2'-hydroxy corresponding base
  modified_base (17)..(17): 2'-hydroxy corresponding base
  modified_base (18)..(18): 2'-hydroxy corresponding base
  modified_base (19)..(19): 2'-hydroxy corresponding base
  modified_base (20)..(20): deoxythymidine
  modified_base (21)..(21): 5'-thio thymidine
gccuggaguuuauucggaatt

SEQ ID NO: 1452 - RNA, 21 nt, Artificial Sequence
  Description of Artificial Sequence: Synthetic oligonucleotide
  siRNAs to PCSK9
  modified_base (1)..(1): 2'-hydroxy corresponding base
  modified_base (2)..(2): 2'-hydroxy corresponding base
  modified_base (3)..(3): 2'-hydroxy corresponding base
  modified_base (4)..(4): 2'-hydroxy corresponding base
  modified_base (5)..(5): 2'-hydroxy corresponding base
  modified_base (6)..(6): 2'-O-methyl corresponding base
  modified_base (7)..(7): 2'-O-methyl corresponding base
  modified_base (8)..(8): 2'-hydroxy corresponding base
  modified_base (9)..(9): 2'-hydroxy corresponding base
  modified_base (10)..(10): 2'-O-methyl corresponding base
  modified_base (11)..(11): 2'-O-methyl corresponding base
  modified_base (12)..(12): 2'-hydroxy corresponding base
  modified_base (13)..(13): 2'-hydroxy corresponding base
  modified_base (14)..(14): 2'-hydroxy corresponding base
  modified_base (15)..(15): 2'-hydroxy corresponding base
  modified_base (16)..(16): 2'-hydroxy corresponding base
  modified_base (17)..(17): 2'-O-methyl corresponding base
  modified_base (18)..(18): 2'-O-methyl corresponding base
  modified_base (19)..(19): 2'-O-methyl corresponding base
  modified_base (20)..(20): 2'-O-methyl corresponding base 5'-monophosphorothioate
  modified_base (21)..(21): 2'-O-methyl corresponding base 5'-monophosphorothioate
uuccgaauaaacuccaggccu

SEQ ID NO: 1453 - DNA, 21 bp, Artificial Sequence
  Description of Artificial Sequence: Synthetic oligonucleotide
  Description of Combined DNA/RNA Molecule: Synthetic oligonucleotide
  siRNAs to PCSK9
  modified_base (1)..(1): 2'-hydroxy corresponding base
  modified_base (2)..(2): 2'-deoxy-2'-fluoro corresponding base
  modified_base (3)..(3): 2'-deoxy-2'-fluoro corresponding base
  modified_base (4)..(4): 2'-deoxy-2'-fluoro corresponding base
  modified_base (5)..(5): 2'-hydroxy corresponding base
  modified_base (6)..(6): 2'-hydroxy corresponding base
  modified_base (7)..(7): 2'-hydroxy corresponding base
  modified_base (8)..(8): 2'-hydroxy corresponding base
  modified_base (9)..(9): 2'-deoxy-2'-fluoro corresponding base
  modified_base (10)..(10): 2'-deoxy-2'-fluoro corresponding base
  modified_base (11)..(11): 2'-deoxy-2'-fluoro corresponding base
  modified_base (12)..(12): 2'-hydroxy corresponding base
  modified_base (13)..(13): 2'-deoxy-2'-fluoro corresponding base
  modified_base (14)..(14): 2'-deoxy-2'-fluoro corresponding base
  modified_base (15)..(15): 2'-deoxy-2'-fluoro corresponding base
  modified_base (16)..(16): 2'-hydroxy corresponding base
  modified_base (17)..(17): 2'-hydroxy corresponding base
  modified_base (18)..(18): 2'-hydroxy corresponding base
  modified_base (19)..(19): 2'-hydroxy corresponding base
  modified_base (20)..(20): deoxythymidine
  modified_base (21)..(21): 5'-thio thymidine
gccuggaguuuauucggaatt

SEQ ID NO: 1454 - RNA, 21 nt, Artificial Sequence
  Description of Artificial Sequence: Synthetic oligonucleotide
  siRNAs to PCSK9
  modified_base (1)..(1): 2'-hydroxy corresponding base
  modified_base (2)..(2): 2'-hydroxy corresponding base
  modified_base (3)..(3): 2'-hydroxy corresponding base
  modified_base (4)..(4): 2'-hydroxy corresponding base
  modified_base (5)..(5): 2'-hydroxy corresponding base
  modified_base (6)..(6): 2'-hydroxy corresponding base
  modified_base (7)..(7): 2'-hydroxy corresponding base
  modified_base (8)..(8): 2'-hydroxy corresponding base
  modified_base (9)..(9): 2'-hydroxy corresponding base
  modified_base (10)..(10): 2'-hydroxy corresponding base
  modified_base (11)..(11): 2'-hydroxy corresponding base
  modified_base (12)..(12): 2'-hydroxy corresponding base
  modified_base (13)..(13): 2'-hydroxy corresponding base
  modified_base (14)..(14): 2'-hydroxy corresponding base
  modified_base (15)..(15): 2'-hydroxy corresponding base
  modified_base (16)..(16): 2'-hydroxy corresponding base
  modified_base (17)..(17): 2'-hydroxy corresponding base
  modified_base (18)..(18): 2'-hydroxy corresponding base
  modified_base (19)..(19): 2'-hydroxy corresponding base
  modified_base (20)..(20): 2'-O-methyl corresponding base 5'-monophosphorothioate
  modified_base (21)..(21): 2'-O-methyl corresponding base 5'-monophosphorothioate
uuccgaauaaacuccaggccu

SEQ ID NO: 1455 - DNA, 21 bp, Artificial Sequence
  Description of Artificial Sequence: Synthetic oligonucleotide
  Description of Combined DNA/RNA Molecule: Synthetic oligonucleotide
  siRNAs to PCSK9
  modified_base (1)..(1): 2'-hydroxy corresponding base
  modified_base (2)..(2): 2'-deoxy-2'-fluoro corresponding base
  modified_base (3)..(3): 2'-deoxy-2'-fluoro corresponding base
  modified_base (4)..(4): 2'-deoxy-2'-fluoro corresponding base
  modified_base (5)..(5): 2'-hydroxy corresponding base
  modified_base (6)..(6): 2'-hydroxy corresponding base
  modified_base (7)..(7): 2'-hydroxy corresponding base
  modified_base (8)..(8): 2'-hydroxy corresponding base
  modified_base (9)..(9): 2'-deoxy-2'-fluoro corresponding base
  modified_base (10)..(10): 2'-deoxy-2'-fluoro corresponding base
  modified_base (11)..(11): 2'-deoxy-2'-fluoro corresponding base
  modified_base (12)..(12): 2'-hydroxy corresponding base
  modified_base (13)..(13): 2'-deoxy-2'-fluoro corresponding base
  modified_base (14)..(14): 2'-deoxy-2'-fluoro corresponding base
  modified_base (15)..(15): 2'-deoxy-2'-fluoro corresponding base
  modified_base (16)..(16): 2'-hydroxy corresponding base
  modified_base (17)..(17): 2'-hydroxy corresponding base
  modified_base (18)..(18): 2'-hydroxy corresponding base
  modified_base (19)..(19): 2'-hydroxy corresponding base
  modified_base (20)..(20): deoxythymidine
  modified_base (21)..(21): 5'-thio thymidine
gccuggaguuuauucggaatt

SEQ ID NO: 1456 - RNA, 21 nt, Artificial Sequence
  Description of Artificial Sequence: Synthetic oligonucleotide
  siRNAs to PCSK9
  modified_base (1)..(1): 2'-O-methyl corresponding base
  modified_base (2)..(2): 2'-deoxy-2'-fluoro corresponding base
  modified_base (3)..(3): 2'-O-methyl corresponding base
  modified_base (4)..(4): 2'-deoxy-2'-fluoro corresponding base
  modified_base (5)..(5): 2'-O-methyl corresponding base
  modified_base (6)..(6): 2'-deoxy-2'-fluoro corresponding base
  modified_base (7)..(7): 2'-O-methyl corresponding base
  modified_base (8)..(8): 2'-deoxy-2'-fluoro corresponding base
  modified_base (9)..(9): 2'-O-methyl corresponding base
  modified_base (10)..(10): 2'-deoxy-2'-fluoro corresponding base
  modified_base (11)..(11): 2'-O-methyl corresponding base
  modified_base (12)..(12): 2'-deoxy-2'-fluoro corresponding base
  modified_base (13)..(13): 2'-O-methyl corresponding base
  modified_base (14)..(14): 2'-deoxy-2'-fluoro corresponding base
  modified_base (15)..(15): 2'-O-methyl corresponding base
  modified_base (16)..(16): 2'-deoxy-2'-fluoro corresponding base
  modified_base (17)..(17): 2'-O-methyl corresponding base
  modified_base (18)..(18): 2'-deoxy-2'-fluoro corresponding base
  modified_base (19)..(19): 2'-O-methyl corresponding base
  modified_base (20)..(20): 2'-deoxy-2'-fluoro corresponding base 5'-monophosphorothioate
  modified_base (21)..(21): 2'-O-methyl corresponding base 5'-monophosphorothioate
uuccgaauaaacuccaggccu

SEQ ID NO: 1457 - DNA, 21 bp, Artificial Sequence
  Description of Artificial Sequence: Synthetic oligonucleotide
  Description of Combined DNA/RNA Molecule: Synthetic oligonucleotide
  siRNAs to PCSK9
  modified_base (1)..(1): 2'-hydroxy corresponding base
  modified_base (2)..(2): 2'-deoxy-2'-fluoro corresponding base
  modified_base (3)..(3): 2'-deoxy-2'-fluoro corresponding base
  modified_base (4)..(4): 2'-deoxy-2'-fluoro corresponding base
  modified_base (5)..(5): 2'-hydroxy corresponding base
  modified_base (6)..(6): 2'-hydroxy corresponding base
  modified_base (7)..(7): 2'-hydroxy corresponding base
  modified_base (8)..(8): 2'-hydroxy corresponding base
  modified_base (9)..(9): 2'-deoxy-2'-fluoro corresponding base
  modified_base (10)..(10): 2'-deoxy-2'-fluoro corresponding base
  modified_base (11)..(11): 2'-deoxy-2'-fluoro corresponding base
  modified_base (12)..(12): 2'-hydroxy corresponding base
  modified_base (13)..(13): 2'-deoxy-2'-fluoro corresponding base
  modified_base (14)..(14): 2'-deoxy-2'-fluoro corresponding base
  modified_base (15)..(15): 2'-deoxy-2'-fluoro corresponding base
  modified_base (16)..(16): 2'-hydroxy corresponding base
  modified_base (17)..(17): 2'-hydroxy corresponding base
  modified_base (18)..(18): 2'-hydroxy corresponding base
  modified_base (19)..(19): 2'-hydroxy corresponding base
  modified_base (20)..(20): deoxythymidine
  modified_base (21)..(21): 5'-thio thymidine
gccuggaguuuauucggaatt

SEQ ID NO: 1458 - DNA, 21 bp, Artificial Sequence
  Description of Artificial Sequence: Synthetic oligonucleotide
  Description of Combined DNA/RNA Molecule: Synthetic oligonucleotide
  siRNAs to PCSK9
  modified_base (1)..(1): 2'-O-methyl corresponding base
  modified_base (2)..(2): 2'-deoxy-2'-fluoro corresponding base
  modified_base (3)..(3): 2'-O-methyl corresponding base
  modified_base (4)..(4): 2'-deoxy-2'-fluoro corresponding base
  modified_base (5)..(5): 2'-O-methyl corresponding base
  modified_base (6)..(6): 2'-deoxy-2'-fluoro corresponding base
  modified_base (7)..(7): 2'-O-methyl corresponding base
  modified_base (8)..(8): 2'-deoxy-2'-fluoro corresponding base
  modified_base (9)..(9): 2'-O-methyl corresponding base
  modified_base (10)..(10): 2'-deoxy-2'-fluoro corresponding base
  modified_base (11)..(11): 2'-O-methyl corresponding base
  modified_base (12)..(12): 2'-deoxy-2'-fluoro corresponding base
  modified_base (13)..(13): 2'-O-methyl corresponding base
  modified_base (14)..(14): 2'-deoxy-2'-fluoro corresponding base
  modified_base (15)..(15): 2'-O-methyl corresponding base
  modified_base (16)..(16): 2'-deoxy-2'-fluoro corresponding base
  modified_base (17)..(17): 2'-O-methyl corresponding base
  modified_base (18)..(18): 2'-deoxy-2'-fluoro corresponding base
  modified_base (19)..(19): 2'-O-methyl corresponding base
  modified_base (20)..(20): deoxythymidine
  modified_base (21)..(21): 5'-thio thymidine
uuccgaauaaacuccaggctt

SEQ ID NO: 1459 - DNA, 21 bp, Artificial Sequence
  Description of Artificial Sequence: Synthetic oligonucleotide
  Description of Combined DNA/RNA Molecule: Synthetic oligonucleotide
  siRNAs to PCSK9
  modified_base (1)..(1): 2'-hydroxy corresponding base
  modified_base (2)..(2): 2'-deoxy-2'-fluoro corresponding base
  modified_base (3)..(3): 2'-deoxy-2'-fluoro corresponding base
  modified_base (4)..(4): 2'-deoxy-2'-fluoro corresponding base
  modified_base (5)..(5): 2'-hydroxy corresponding base
  modified_base (6)..(6): 2'-hydroxy corresponding base
  modified_base (7)..(7): 2'-hydroxy corresponding base
  modified_base (8)..(8): 2'-hydroxy corresponding base
  modified_base (9)..(9): 2'-deoxy-2'-fluoro corresponding base
  modified_base (10)..(10): 2'-deoxy-2'-fluoro corresponding base
  modified_base (11)..(11): 2'-deoxy-2'-fluoro corresponding base
  modified_base (12)..(12): 2'-hydroxy corresponding base
  modified_base (13)..(13): 2'-deoxy-2'-fluoro corresponding base
  modified_base (14)..(14): 2'-deoxy-2'-fluoro corresponding base
  modified_base (15)..(15): 2'-deoxy-2'-fluoro corresponding base
  modified_base (16)..(16): 2'-hydroxy corresponding base
  modified_base (17)..(17): 2'-hydroxy corresponding base
  modified_base (18)..(18): 2'-hydroxy corresponding base
  modified_base (19)..(19): 2'-hydroxy corresponding base
  modified_base (20)..(20): deoxythymidine
  modified_base (21)..(21): 5'-thio thymidine
gccuggaguuuauucggaatt

SEQ ID NO: 1460 - DNA, 21 bp, Artificial Sequence
  Description of Artificial Sequence: Synthetic oligonucleotide
  Description of Combined DNA/RNA Molecule: Synthetic oligonucleotide
  siRNAs to PCSK9
  modified_base (1)..(1): 2'-deoxy-2'-fluoro corresponding base
  modified_base (2)..(2): 2'-deoxy-2'-fluoro corresponding base
  modified_base (3)..(3): 2'-deoxy-2'-fluoro corresponding base
  modified_base (4)..(4): 2'-deoxy-2'-fluoro corresponding base
  modified_base (5)..(5): 2'-hydroxy corresponding base
  modified_base (6)..(6): 2'-hydroxy corresponding base
  modified_base (7)..(7): 2'-hydroxy corresponding base
  modified_base (8)..(8): 2'-deoxy-2'-fluoro corresponding base
  modified_base (9)..(9): 2'-hydroxy corresponding base
  modified_base (10)..(10): 2'-hydroxy corresponding base
  modified_base (11)..(11): 2'-hydroxy corresponding base
  modified_base (12)..(12): 2'-deoxy-2'-fluoro corresponding base
  modified_base (13)..(13): 2'-deoxy-2'-fluoro corresponding base
  modified_base (14)..(14): 2'-deoxy-2'-fluoro corresponding base
  modified_base (15)..(15): 2'-deoxy-2'-fluoro corresponding base
  modified_base (16)..(16): 2'-hydroxy corresponding base
  modified_base (17)..(17): 2'-hydroxy corresponding base
  modified_base (18)..(18): 2'-hydroxy corresponding base
  modified_base (19)..(19): 2'-deoxy-2'-fluoro corresponding base
  modified_base (20)..(20): deoxythymidine
  modified_base (21)..(21): 5'-thio thymidine
uuccgaauaaacuccaggctt

SEQ ID NO: 1461 - DNA, 21 bp, Artificial Sequence
  Description of Artificial Sequence: Synthetic oligonucleotide
  Description of Combined DNA/RNA Molecule: Synthetic oligonucleotide
  siRNAs to PCSK9
  modified_base (1)..(1): 2'-hydroxy corresponding base
  modified_base (2)..(2): 2'-hydroxy corresponding base
  modified_base (3)..(3): 2'-hydroxy corresponding base
  modified_base (4)..(4): 2'-hydroxy corresponding base
  modified_base (5)..(5): 2'-hydroxy corresponding base
  modified_base (6)..(6): 2'-hydroxy corresponding base
  modified_base (7)..(7): 2'-hydroxy corresponding base
  modified_base (8)..(8): 2'-hydroxy corresponding base
  modified_base (9)..(9): 2'-hydroxy corresponding base
  modified_base (10)..(10): 2'-hydroxy corresponding base
  modified_base (11)..(11): 2'-hydroxy corresponding base
  modified_base (12)..(12): 2'-hydroxy corresponding base
  modified_base (13)..(13): 2'-hydroxy corresponding base
  modified_base (14)..(14): 2'-hydroxy corresponding base
  modified_base (15)..(15): 2'-hydroxy corresponding base
  modified_base (16)..(16): 2'-hydroxy corresponding base
  modified_base (17)..(17): 2'-hydroxy corresponding base
  modified_base (18)..(18): 2'-hydroxy corresponding base
  modified_base (19)..(19): 2'-hydroxy corresponding base
  modified_base (20)..(20): deoxythymidine
  modified_base (21)..(21): 5'-thio thymidine
gccuggaguuuauucggaatt

SEQ ID NO: 1462 - DNA, 21 bp, Artificial Sequence
  Description of Artificial Sequence: Synthetic oligonucleotide
  Description of Combined DNA/RNA Molecule: Synthetic oligonucleotide
  siRNAs to PCSK9
  modified_base (1)..(1): 2'-deoxy-2'-fluoro corresponding base
  modified_base (2)..(2): 2'-deoxy-2'-fluoro corresponding base
  modified_base (3)..(3): 2'-deoxy-2'-fluoro corresponding base
  modified_base (4)..(4): 2'-deoxy-2'-fluoro corresponding base
  modified_base (5)..(5): 2'-hydroxy corresponding base
  modified_base (6)..(6): 2'-hydroxy corresponding base
  modified_base (7)..(7): 2'-hydroxy corresponding base
  modified_base (8)..(8): 2'-deoxy-2'-fluoro corresponding base
  modified_base (9)..(9): 2'-hydroxy corresponding base
  modified_base (10)..(10): 2'-hydroxy corresponding base
  modified_base (11)..(11): 2'-hydroxy corresponding base
  modified_base (12)..(12): 2'-deoxy-2'-fluoro corresponding base
  modified_base (13)..(13): 2'-deoxy-2'-fluoro corresponding base
  modified_base (14)..(14): 2'-deoxy-2'-fluoro corresponding base
  modified_base (15)..(15): 2'-deoxy-2'-fluoro corresponding base
  modified_base (16)..(16): 2'-hydroxy corresponding base
  modified_base (17)..(17): 2'-hydroxy corresponding base
  modified_base (18)..(18): 2'-hydroxy corresponding base
  modified_base (19)..(19): 2'-deoxy-2'-fluoro corresponding base
  modified_base (20)..(20): deoxythymidine
  modified_base (21)..(21): 5'-thio thymidine
uuccgaauaaacuccaggctt

SEQ ID NO: 1463 - DNA, 21 bp, Artificial Sequence
  Description of Artificial Sequence: Synthetic oligonucleotide
  Description of Combined DNA/RNA Molecule: Synthetic oligonucleotide
  siRNAs to PCSK9
  modified_base (1)..(1): 2'-hydroxy corresponding base
  modified_base (2)..(2): 2'-O-methyl corresponding base
  modified_base (3)..(3): 2'-O-methyl corresponding base
  modified_base (4)..(4): 2'-O-methyl corresponding base
  modified_base (5)..(5): 2'-hydroxy corresponding base
  modified_base (6)..(6): 2'-hydroxy corresponding base
  modified_base (7)..(7): 2'-hydroxy corresponding base
  modified_base (8)..(8): 2'-hydroxy corresponding base
  modified_base (9)..(9): 2'-O-methyl corresponding base
  modified_base (10)..(10): 2'-O-methyl corresponding base
  modified_base (11)..(11): 2'-O-methyl corresponding base
  modified_base (12)..(12): 2'-hydroxy corresponding base
  modified_base (13)..(13): 2'-O-methyl corresponding base
  modified_base (14)..(14): 2'-O-methyl corresponding base
  modified_base (15)..(15): 2'-O-methyl corresponding base
  modified_base (16)..(16): 2'-hydroxy corresponding base
  modified_base (17)..(17): 2'-hydroxy corresponding base
  modified_base (18)..(18): 2'-hydroxy corresponding base
  modified_base (19)..(19): 2'-hydroxy corresponding base
  modified_base (20)..(20): deoxythymidine
  modified_base (21)..(21): 5'-thio thymidine
gccuggaguuuauucggaatt

SEQ ID NO: 1464 - DNA, 21 bp, Artificial Sequence
  Description of Artificial Sequence: Synthetic oligonucleotide
  Description of Combined DNA/RNA Molecule: Synthetic oligonucleotide
  siRNAs to PCSK9
  modified_base (1)..(1): 2'-deoxy-2'-fluoro corresponding base
  modified_base (2)..(2): 2'-deoxy-2'-fluoro corresponding base
  modified_base (3)..(3): 2'-deoxy-2'-fluoro corresponding base
  modified_base (4)..(4): 2'-deoxy-2'-fluoro corresponding base
  modified_base (5)..(5): 2'-hydroxy corresponding base
  modified_base (6)..(6): 2'-hydroxy corresponding base
  modified_base (7)..(7): 2'-hydroxy corresponding base
  modified_base (8)..(8): 2'-deoxy-2'-fluoro corresponding base
  modified_base (9)..(9): 2'-hydroxy corresponding base
  modified_base (10)..(10): 2'-hydroxy corresponding base
  modified_base (11)..(11): 2'-hydroxy corresponding base
  modified_base (12)..(12): 2'-deoxy-2'-fluoro corresponding base
  modified_base (13)..(13): 2'-deoxy-2'-fluoro corresponding base
  modified_base (14)..(14): 2'-deoxy-2'-fluoro corresponding base
  modified_base (15)..(15): 2'-deoxy-2'-fluoro corresponding base
  modified_base (16)..(16): 2'-hydroxy corresponding base
  modified_base (17)..(17): 2'-hydroxy corresponding base
  modified_base (18)..(18): 2'-hydroxy corresponding base
  modified_base (19)..(19): 2'-deoxy-2'-fluoro corresponding base
  modified_base (20)..(20): deoxythymidine
  modified_base (21)..(21): 5'-thio thymidine
uuccgaauaaacuccaggctt

SEQ ID NO: 1465 - DNA, 21 bp, Artificial Sequence
  Description of Artificial Sequence: Synthetic oligonucleotide
  Description of Combined DNA/RNA Molecule: Synthetic oligonucleotide
  siRNAs to PCSK9
  modified_base (1)..(1): 2'-hydroxy corresponding base
  modified_base (2)..(2): 2'-O-methyl corresponding base
  modified_base (3)..(3): 2'-hydroxy corresponding base
  modified_base (4)..(4): 2'-O-methyl corresponding base
  modified_base (5)..(5): 2'-hydroxy corresponding base
  modified_base (6)..(6): 2'-O-methyl corresponding base
  modified_base (7)..(7): 2'-hydroxy corresponding base
  modified_base (8)..(8): 2'-O-methyl corresponding base
  modified_base (9)..(9): 2'-hydroxy corresponding base
  modified_base (10)..(10): 2'-O-methyl corresponding base
  modified_base (11)..(11): 2'-hydroxy corresponding base
  modified_base (12)..(12): 2'-O-methyl corresponding base
  modified_base (13)..(13): 2'-hydroxy corresponding base
  modified_base (14)..(14): 2'-O-methyl corresponding base
  modified_base (15)..(15): 2'-hydroxy corresponding base
  modified_base (16)..(16): 2'-O-methyl corresponding base
  modified_base (17)..(17): 2'-hydroxy corresponding base
  modified_base (18)..(18): 2'-O-methyl corresponding base
  modified_base (19)..(19): 2'-hydroxy corresponding base
  modified_base (20)..(20): deoxythymidine
  modified_base (21)..(21): 5'-thio thymidine
gccuggaguuuauucggaatt

SEQ ID NO: 1466 - DNA, 21 bp, Artificial Sequence
  Description of Artificial Sequence: Synthetic oligonucleotide
  Description of Combined DNA/RNA Molecule: Synthetic oligonucleotide
  siRNAs to PCSK9
  modified_base (1)..(1): 2'-deoxy-2'-fluoro corresponding base
  modified_base (2)..(2): 2'-deoxy-2'-fluoro corresponding base
  modified_base (3)..(3): 2'-deoxy-2'-fluoro corresponding base
  modified_base (4)..(4): 2'-deoxy-2'-fluoro corresponding base
  modified_base (5)..(5): 2'-hydroxy corresponding base
  modified_base (6)..(6): 2'-hydroxy corresponding base
  modified_base (7)..(7): 2'-hydroxy corresponding base
  modified_base (8)..(8): 2'-deoxy-2'-fluoro corresponding base
  modified_base (9)..(9): 2'-hydroxy corresponding base
  modified_base (10)..(10): 2'-hydroxy corresponding base
  modified_base (11)..(11): 2'-hydroxy corresponding base
  modified_base (12)..(12): 2'-deoxy-2'-fluoro corresponding base
  modified_base (13)..(13): 2'-deoxy-2'-fluoro corresponding base
  modified_base (14)..(14): 2'-deoxy-2'-fluoro corresponding base
  modified_base (15)..(15): 2'-deoxy-2'-fluoro corresponding base
  modified_base (16)..(16): 2'-hydroxy corresponding base
  modified_base (17)..(17): 2'-hydroxy corresponding base
  modified_base (18)..(18): 2'-hydroxy corresponding base
  modified_base (19)..(19): 2'-deoxy-2'-fluoro corresponding base
  modified_base (20)..(20): deoxythymidine
  modified_base (21)..(21): 5'-thio thymidine
uuccgaauaaacuccaggctt

SEQ ID NO: 1467 - RNA, 19 nt, Artificial Sequence
  Description of Artificial Sequence: Synthetic oligonucleotide
  siRNAs to PCSK9
  modified_base (1)..(1): 2'-deoxy-2'-fluoro corresponding base
  modified_base (2)..(2): 2'-O-methyl corresponding base
  modified_base (3)..(3): 2'-deoxy-2'-fluoro corresponding base
  modified_base (4)..(4): 2'-O-methyl corresponding base
  modified_base (5)..(5): 2'-deoxy-2'-fluoro corresponding base
  modified_base (6)..(6): 2'-O-methyl corresponding base
  modified_base (7)..(7): 2'-deoxy-2'-fluoro corresponding base
  modified_base (8)..(8): 2'-O-methyl corresponding base
  modified_base (9)..(9): 2'-deoxy-2'-fluoro corresponding base
  modified_base (10)..(10): 2'-O-methyl corresponding base
  modified_base (11)..(11): 2'-deoxy-2'-fluoro corresponding base
  modified_base (12)..(12): 2'-O-methyl corresponding base
  modified_base (13)..(13): 2'-deoxy-2'-fluoro corresponding base
  modified_base (14)..(14): 2'-O-methyl corresponding base
  modified_base (15)..(15): 2'-deoxy-2'-fluoro corresponding base
  modified_base (16)..(16): 2'-O-methyl corresponding base
  modified_base (17)..(17): 2'-deoxy-2'-fluoro corresponding base
  modified_base (18)..(18): 2'-O-methyl corresponding base
  modified_base (19)..(19): 2'-deoxy-2'-fluoro corresponding base
gccuggaguuuauucggaa

SEQ ID NO: 1468 - DNA, 21 bp, Artificial Sequence
  Description of Artificial Sequence: Synthetic oligonucleotide
  Description of Combined DNA/RNA Molecule: Synthetic oligonucleotide
  siRNAs to PCSK9
  modified_base (1)..(1): 2'-deoxy-2'-fluoro corresponding base
  modified_base (2)..(2): 2'-deoxy-2'-fluoro corresponding base
  modified_base (3)..(3): 2'-deoxy-2'-fluoro corresponding base
  modified_base (4)..(4): 2'-deoxy-2'-fluoro corresponding base
  modified_base (5)..(5): 2'-hydroxy corresponding base
  modified_base (6)..(6): 2'-hydroxy corresponding base
  modified_base (7)..(7): 2'-hydroxy corresponding base
  modified_base (8)..(8): 2'-deoxy-2'-fluoro corresponding base
  modified_base (9)..(9): 2'-hydroxy corresponding base
  modified_base (10)..(10): 2'-hydroxy corresponding base
  modified_base (11)..(11): 2'-hydroxy corresponding base
  modified_base (12)..(12): 2'-deoxy-2'-fluoro corresponding base
  modified_base (13)..(13): 2'-deoxy-2'-fluoro corresponding base
  modified_base (14)..(14): 2'-deoxy-2'-fluoro corresponding base
  modified_base (15)..(15): 2'-deoxy-2'-fluoro corresponding base
  modified_base (16)..(16): 2'-hydroxy corresponding base
  modified_base (17)..(17): 2'-hydroxy corresponding base
  modified_base (18)..(18): 2'-hydroxy corresponding base
  modified_base (19)..(19): 2'-deoxy-2'-fluoro corresponding base
  modified_base (20)..(20): deoxythymidine
  modified_base (21)..(21): 5'-thio thymidine
uuccgaauaaacuccaggctt

SEQ ID NO: 1469 - RNA, 20 nt, Artificial Sequence
  Description of Artificial Sequence: Synthetic oligonucleotide
  siRNAs to PCSK9
  modified_base (1)..(1): 2'-hydroxy corresponding base
  modified_base (2)..(2): 2'-deoxy-2'-fluoro corresponding base
  modified_base (3)..(3): 2'-deoxy-2'-fluoro corresponding base
  modified_base (4)..(4): 2'-deoxy-2'-fluoro corresponding base
  modified_base (5)..(5): 2'-hydroxy corresponding base
  modified_base (6)..(6): 2'-hydroxy corresponding base
  modified_base (7)..(7): 2'-hydroxy corresponding base
  modified_base (8)..(8): 2'-hydroxy corresponding base
  modified_base (9)..(9): 2'-hydroxy corresponding base
  modified_base (10)..(10): 2'-deoxy-2'-fluoro corresponding base
  modified_base (11)..(11): 2'-deoxy-2'-fluoro corresponding base
  modified_base (12)..(12): 2'-deoxy-2'-fluoro corresponding base
  modified_base (13)..(13): 2'-hydroxy corresponding base
  modified_base (14)..(14): 2'-deoxy-2'-fluoro corresponding base
  modified_base (15)..(15): 2'-deoxy-2'-fluoro corresponding base
  modified_base (16)..(16): 2'-deoxy-2'-fluoro corresponding base
  modified_base (17)..(17): 2'-hydroxy corresponding base
  modified_base (18)..(18): 2'-hydroxy corresponding base
  modified_base (19)..(19): 2'-hydroxy corresponding base
  modified_base (20)..(20): 2'-hydroxy corresponding base
gccuggagguuuauucggaa

SEQ ID NO: 1470 - RNA, 21 nt, Artificial Sequence
  Description of Artificial Sequence: Synthetic oligonucleotide
  siRNAs to PCSK9
  modified_base (1)..(1): 2'-deoxy-2'-fluoro corresponding base
  modified_base (2)..(2): 2'-deoxy-2'-fluoro corresponding base
  modified_base (3)..(3): 2'-deoxy-2'-fluoro corresponding base
  modified_base (4)..(4): 2'-deoxy-2'-fluoro corresponding base
  modified_base (5)..(5): 2'-hydroxy corresponding base
  modified_base (6)..(6): 2'-hydroxy corresponding base
  modified_base (7)..(7): 2'-hydroxy corresponding base
  modified_base (8)..(8): 2'-deoxy-2'-fluoro corresponding base
  modified_base (9)..(9): 2'-hydroxy corresponding base
  modified_base (10)..(10): 2'-hydroxy corresponding base
  modified_base (11)..(11): 2'-hydroxy corresponding base
  modified_base (12)..(12): 2'-deoxy-2'-fluoro corresponding base
  modified_base (13)..(13): 2'-deoxy-2'-fluoro corresponding base
  modified_base (14)..(14): 2'-deoxy-2'-fluoro corresponding base
  modified_base (15)..(15): 2'-deoxy-2'-fluoro corresponding base
  modified_base (16)..(16): 2'-hydroxy corresponding base
  modified_base (17)..(17): 2'-hydroxy corresponding base
  modified_base (18)..(18): 2'-hydroxy corresponding base
  modified_base (19)..(19): 2'-deoxy-2'-fluoro corresponding base
  modified_base (20)..(20): 2'-deoxy-2'-fluoro corresponding base 5'-monophosphorothioate
  modified_base (21)..(21): 2'-deoxy-2'-fluoro corresponding base 5'-monophosphorothioate
uuccgaauaaacuccaggccu

SEQ ID NO: 1471 - RNA, 20 nt, Artificial Sequence
  Description of Artificial Sequence: Synthetic oligonucleotide
  siRNAs to PCSK9
  modified_base (1)..(1): 2'-hydroxy corresponding base
  modified_base (2)..(2): 2'-deoxy-2'-fluoro corresponding base
  modified_base (3)..(3): 2'-deoxy-2'-fluoro corresponding base
  modified_base (4)..(4): 2'-deoxy-2'-fluoro corresponding base
  modified_base (5)..(5): 2'-hydroxy corresponding base
  modified_base (6)..(6): 2'-hydroxy corresponding base
  modified_base (7)..(7): 2'-hydroxy corresponding base
  modified_base (8)..(8): 2'-hydroxy corresponding base
  modified_base (9)..(9): 2'-hydroxy corresponding base
  modified_base (10)..(10): 2'-deoxy-2'-fluoro corresponding base
  modified_base (11)..(11): 2'-deoxy-2'-fluoro corresponding base
  modified_base (12)..(12): 2'-deoxy-2'-fluoro corresponding base
  modified_base (13)..(13): 2'-hydroxy corresponding base
  modified_base (14)..(14): 2'-deoxy-2'-fluoro corresponding base
  modified_base (15)..(15): 2'-deoxy-2'-fluoro corresponding base
  modified_base (16)..(16): 2'-deoxy-2'-fluoro corresponding base
  modified_base (17)..(17): 2'-hydroxy corresponding base
  modified_base (18)..(18): 2'-hydroxy corresponding base
  modified_base (19)..(19): 2'-hydroxy corresponding base
  modified_base (20)..(20): 2'-hydroxy corresponding base
gccuggagguuuauucggaa

SEQ ID NO: 1472 - RNA, 19 nt, Artificial Sequence
  Description of Artificial Sequence: Synthetic oligonucleotide
  siRNAs to PCSK9
  modified_base (1)..(1): 2'-O-methyl corresponding base
  modified_base (2)..(2): 2'-deoxy-2'-fluoro corresponding base
  modified_base (3)..(3): 2'-O-methyl corresponding base
  modified_base (4)..(4): 2'-deoxy-2'-fluoro corresponding base
  modified_base (5)..(5): 2'-O-methyl corresponding base
  modified_base (6)..(6): 2'-deoxy-2'-fluoro corresponding base
  modified_base (7)..(7): 2'-O-methyl corresponding base
  modified_base (8)..(8): 2'-deoxy-2'-fluoro corresponding base
  modified_base (9)..(9): 2'-O-methyl corresponding base
  modified_base (10)..(10): 2'-deoxy-2'-fluoro corresponding base
  modified_base (11)..(11): 2'-O-methyl corresponding base
  modified_base (12)..(12): 2'-deoxy-2'-fluoro corresponding base
  modified_base (13)..(13): 2'-O-methyl corresponding base
  modified_base (14)..(14): 2'-deoxy-2'-fluoro corresponding base
  modified_base (15)..(15): 2'-O-methyl corresponding base
  modified_base (16)..(16): 2'-deoxy-2'-fluoro corresponding base
  modified_base (17)..(17): 2'-O-methyl corresponding base
  modified_base (18)..(18): 2'-deoxy-2'-fluoro corresponding base
  modified_base (19)..(19): 2'-O-methyl corresponding base
uuccgaauaaacuccaggc

SEQ ID NO: 1473 - RNA, 20 nt, Artificial Sequence
  Description of Artificial Sequence: Synthetic oligonucleotide
  siRNAs to PCSK9
  modified_base (1)..(1): 2'-hydroxy corresponding base
  modified_base (2)..(2): 2'-deoxy-2'-fluoro corresponding base
  modified_base (3)..(3): 2'-deoxy-2'-fluoro corresponding base
  modified_base (4)..(4): 2'-deoxy-2'-fluoro corresponding base
  modified_base (5)..(5): 2'-hydroxy corresponding base
  modified_base (6)..(6): 2'-hydroxy corresponding base
  modified_base (7)..(7): 2'-hydroxy corresponding base
  modified_base (8)..(8): 2'-hydroxy corresponding base
  modified_base (9)..(9): 2'-hydroxy corresponding base
  modified_base (10)..(10): 2'-deoxy-2'-fluoro corresponding base
  modified_base (11)..(11): 2'-deoxy-2'-fluoro corresponding base
  modified_base (12)..(12): 2'-deoxy-2'-fluoro corresponding base
  modified_base (13)..(13): 2'-hydroxy corresponding base
  modified_base (14)..(14): 2'-deoxy-2'-fluoro corresponding base
  modified_base (15)..(15): 2'-deoxy-2'-fluoro corresponding base
  modified_base (16)..(16): 2'-deoxy-2'-fluoro corresponding base
  modified_base (17)..(17): 2'-hydroxy corresponding base
  modified_base (18)..(18): 2'-hydroxy corresponding base
  modified_base (19)..(19): 2'-hydroxy corresponding base
  modified_base (20)..(20): 2'-hydroxy corresponding base
gccuggagguuuauucggaa

SEQ ID NO: 1474 - RNA, 21 nt, Artificial Sequence
  Description of Artificial Sequence: Synthetic oligonucleotide
  siRNAs to PCSK9
  modified_base (1)..(1): 2'-O-methyl corresponding base
  modified_base (2)..(2): 2'-deoxy-2'-fluoro corresponding base
  modified_base (3)..(3): 2'-O-methyl corresponding base
  modified_base (4)..(4): 2'-deoxy-2'-fluoro corresponding base
  modified_base (5)..(5): 2'-O-methyl corresponding base
  modified_base (6)..(6): 2'-deoxy-2'-fluoro corresponding base
  modified_base (7)..(7): 2'-O-methyl corresponding base
  modified_base (8)..(8): 2'-deoxy-2'-fluoro corresponding base
  modified_base (9)..(9): 2'-O-methyl corresponding base
  modified_base (10)..(10): 2'-deoxy-2'-fluoro corresponding base
  modified_base (11)..(11): 2'-O-methyl corresponding base
  modified_base (12)..(12): 2'-deoxy-2'-fluoro corresponding base
  modified_base (13)..(13): 2'-O-methyl corresponding base
  modified_base (14)..(14): 2'-deoxy-2'-fluoro corresponding base
  modified_base (15)..(15): 2'-O-methyl corresponding base
  modified_base (16)..(16): 2'-deoxy-2'-fluoro corresponding base
  modified_base (17)..(17): 2'-O-methyl corresponding base
  modified_base (18)..(18): 2'-deoxy-2'-fluoro corresponding base
  modified_base (19)..(19): 2'-O-methyl corresponding base
  modified_base (20)..(20): 2'-deoxy-2'-fluoro corresponding base 5'-monophosphorothioate
  modified_base (21)..(21): 2'-O-methyl corresponding base 5'-monophosphorothioate
uuccgaauaaacuccaggccu

SEQ ID NO: 1475 - RNA, 20 nt, Artificial Sequence
  Description of Artificial Sequence: Synthetic oligonucleotide
  siRNAs to PCSK9
  modified_base (1)..(1): 2'-hydroxy corresponding base
  modified_base (2)..(2): 2'-deoxy-2'-fluoro corresponding base
  modified_base (3)..(3): 2'-deoxy-2'-fluoro corresponding base
  modified_base (4)..(4): 2'-deoxy-2'-fluoro corresponding base
  modified_base (5)..(5): 2'-hydroxy corresponding base
  modified_base (6)..(6): 2'-hydroxy corresponding base
  modified_base (7)..(7): 2'-hydroxy corresponding base
  modified_base (8)..(8): 2'-hydroxy corresponding base
  modified_base (9)..(9): 2'-hydroxy corresponding base
  modified_base (10)..(10): 2'-deoxy-2'-fluoro corresponding base
  modified_base (11)..(11): 2'-deoxy-2'-fluoro corresponding base
  modified_base (12)..(12): 2'-deoxy-2'-fluoro corresponding base
  modified_base (13)..(13): 2'-hydroxy corresponding base
  modified_base (14)..(14): 2'-deoxy-2'-fluoro corresponding base
  modified_base (15)..(15): 2'-deoxy-2'-fluoro corresponding base
  modified_base (16)..(16): 2'-deoxy-2'-fluoro corresponding base
  modified_base (17)..(17): 2'-hydroxy corresponding base
  modified_base (18)..(18): 2'-hydroxy corresponding base
  modified_base (19)..(19): 2'-hydroxy corresponding base
  modified_base (20)..(20): 2'-hydroxy corresponding base
gccuggagguuuauucggaa

SEQ ID NO: 1476 - RNA, 21 nt, Artificial Sequence
  Description of Artificial Sequence: Synthetic oligonucleotide
  siRNAs to PCSK9
  modified_base (1)..(1): 2'-hydroxy corresponding base
  modified_base (2)..(2): 2'-hydroxy corresponding base
  modified_base (3)..(3): 2'-hydroxy corresponding base
  modified_base (4)..(4): 2'-hydroxy corresponding base
  modified_base (5)..(5): 2'-hydroxy corresponding base
  modified_base (6)..(6): 2'-hydroxy corresponding base
  modified_base (7)..(7): 2'-hydroxy corresponding base
  modified_base (8)..(8): 2'-hydroxy corresponding base
  modified_base (9)..(9): 2'-hydroxy corresponding base
  modified_base (10)..(10): 2'-hydroxy corresponding base
  modified_base (11)..(11): 2'-hydroxy corresponding base
  modified_base (12)..(12): 2'-hydroxy corresponding base
  modified_base (13)..(13): 2'-hydroxy corresponding base
  modified_base (14)..(14): 2'-hydroxy corresponding base
  modified_base (15)..(15): 2'-hydroxy corresponding base
  modified_base (16)..(16): 2'-hydroxy corresponding base
  modified_base (17)..(17): 2'-hydroxy corresponding base
  modified_base (18)..(18): 2'-hydroxy corresponding base
  modified_base (19)..(19): 2'-hydroxy corresponding base
  modified_base (20)..(20): 2'-O-methyl corresponding base 5'-monophosphorothioate
  modified_base (21)..(21): 2'-O-methyl corresponding base 5'-monophosphorothioate
uuccgaauaaacuccaggccu

SEQ ID NO: 1477 - RNA, 20 nt, Artificial Sequence
  Description of Artificial Sequence: Synthetic oligonucleotide
  siRNAs to PCSK9
  modified_base (1)..(1): 2'-hydroxy corresponding base
  modified_base (2)..(2): 2'-deoxy-2'-fluoro corresponding base
  modified_base (3)..(3): 2'-deoxy-2'-fluoro corresponding base
  modified_base (4)..(4): 2'-deoxy-2'-fluoro corresponding base
  modified_base (5)..(5): 2'-hydroxy corresponding base
  modified_base (6)..(6): 2'-hydroxy corresponding base
  modified_base (7)..(7): 2'-hydroxy corresponding base
  modified_base (8)..(8): 2'-hydroxy corresponding base
  modified_base (9)..(9): 2'-hydroxy corresponding base
  modified_base (10)..(10): 2'-deoxy-2'-fluoro corresponding base
  modified_base (11)..(11): 2'-deoxy-2'-fluoro corresponding base
  modified_base (12)..(12): 2'-deoxy-2'-fluoro corresponding base
  modified_base (13)..(13): 2'-hydroxy corresponding base
  modified_base (14)..(14): 2'-deoxy-2'-fluoro corresponding base
  modified_base (15)..(15): 2'-deoxy-2'-fluoro corresponding base
  modified_base (16)..(16): 2'-deoxy-2'-fluoro corresponding base
  modified_base (17)..(17): 2'-hydroxy corresponding base
  modified_base (18)..(18): 2'-hydroxy corresponding base
  modified_base (19)..(19): 2'-hydroxy corresponding base
  modified_base (20)..(20): 2'-hydroxy corresponding base
gccuggagguuuauucggaa

SEQ ID NO: 1478 - RNA, 19 nt, Artificial Sequence
  Description of Artificial Sequence: Synthetic oligonucleotide
  siRNAs to PCSK9
  modified_base (1)..(1): 2'-hydroxy corresponding base
  modified_base (2)..(2): 2'-hydroxy corresponding base
  modified_base (3)..(3): 2'-hydroxy corresponding base
  modified_base (4)..(4): 2'-hydroxy corresponding base
  modified_base (5)..(5): 2'-hydroxy corresponding base
  modified_base (6)..(6): 2'-O-methyl corresponding base
  modified_base (7)..(7): 2'-O-methyl corresponding base
  modified_base (8)..(8): 2'-hydroxy corresponding base
  modified_base (9)..(9): 2'-hydroxy corresponding base
  modified_base (10)..(10): 2'-O-methyl corresponding base
  modified_base (11)..(11): 2'-O-methyl corresponding base
  modified_base (12)..(12): 2'-hydroxy corresponding base
  modified_base (13)..(13): 2'-hydroxy corresponding base
  modified_base (14)..(14): 2'-hydroxy corresponding base
  modified_base (15)..(15): 2'-hydroxy corresponding base
  modified_base (16)..(16): 2'-hydroxy corresponding base
  modified_base (17)..(17): 2'-O-methyl corresponding base
  modified_base (18)..(18): 2'-O-methyl corresponding base
  modified_base (19)..(19): 2'-O-methyl corresponding base
uuccgaauaaacuccaggc

SEQ ID NO: 1479 - RNA, 20 nt, Artificial Sequence
  Description of Artificial Sequence: Synthetic oligonucleotide
  siRNAs to PCSK9
  modified_base (1)..(1): 2'-hydroxy corresponding base
  modified_base (2)..(2): 2'-deoxy-2'-fluoro corresponding base
  modified_base (3)..(3): 2'-deoxy-2'-fluoro corresponding base
  modified_base (4)..(4): 2'-deoxy-2'-fluoro corresponding base
  modified_base (5)..(5): 2'-hydroxy corresponding base
  modified_base (6)..(6): 2'-hydroxy corresponding base
  modified_base (7)..(7): 2'-hydroxy corresponding base
  modified_base (8)..(8): 2'-hydroxy corresponding base
  modified_base (9)..(9): 2'-hydroxy corresponding base
  modified_base (10)..(10): 2'-deoxy-2'-fluoro corresponding base
  modified_base (11)..(11): 2'-deoxy-2'-fluoro corresponding base
  modified_base (12)..(12): 2'-deoxy-2'-fluoro corresponding base
  modified_base (13)..(13): 2'-hydroxy corresponding base
  modified_base (14)..(14): 2'-deoxy-2'-fluoro corresponding base
  modified_base (15)..(15): 2'-deoxy-2'-fluoro corresponding base
  modified_base (16)..(16): 2'-deoxy-2'-fluoro corresponding base
  modified_base (17)..(17): 2'-hydroxy corresponding base
  modified_base (18)..(18): 2'-hydroxy corresponding base
  modified_base (19)..(19): 2'-hydroxy corresponding base
  modified_base (20)..(20): 2'-hydroxy corresponding base
gccuggagguuuauucggaa

SEQ ID NO: 1480 - DNA, 21 bp, Artificial Sequence
  Description of Artificial Sequence: Synthetic oligonucleotide
  Description of Combined DNA/RNA Molecule: Synthetic oligonucleotide
  siRNAs to PCSK9
  modified_base (1)..(1): 2'-hydroxy corresponding base
  modified_base (2)..(2): 2'-hydroxy corresponding base
  modified_base (3)..(3): 2'-hydroxy corresponding base
  modified_base (4)..(4): 2'-hydroxy corresponding base
  modified_base (5)..(5): 2'-hydroxy corresponding base
  modified_base (6)..(6): 2'-hydroxy corresponding base
  modified_base (7)..(7): 2'-hydroxy corresponding base
  modified_base (8)..(8): 2'-hydroxy corresponding base
  modified_base (9)..(9): 2'-hydroxy corresponding base
  modified_base (10)..(10): 2'-hydroxy corresponding base
  modified_base (11)..(11): 2'-hydroxy corresponding base
  modified_base (12)..(12): 2'-hydroxy corresponding base
  modified_base (13)..(13): 2'-hydroxy corresponding base
  modified_base (14)..(14): 2'-hydroxy corresponding base
  modified_base (15)..(15): 2'-hydroxy corresponding base
  modified_base (16)..(16): 2'-hydroxy corresponding base
  modified_base (17)..(17): 2'-hydroxy corresponding base
  modified_base (18)..(18): 2'-hydroxy corresponding base
  modified_base (19)..(19): 2'-hydroxy corresponding base
  modified_base (20)..(20): deoxythymidine
  modified_base (21)..(21): 5'-thio thymidine
uuccgaauaaacuccaggctt

SEQ ID NO: 1481 - RNA, 20 nt, Artificial Sequence
  Description of Artificial Sequence: Synthetic oligonucleotide
  siRNAs to PCSK9
  modified_base (1)..(1): 2'-hydroxy corresponding base
  modified_base (2)..(2): 2'-deoxy-2'-fluoro corresponding base
  modified_base (3)..(3): 2'-deoxy-2'-fluoro corresponding base
  modified_base (4)..(4): 2'-deoxy-2'-fluoro corresponding base
  modified_base (5)..(5): 2'-hydroxy corresponding base
  modified_base (6)..(6): 2'-hydroxy corresponding base
  modified_base (7)..(7): 2'-hydroxy corresponding base
  modified_base (8)..(8): 2'-hydroxy corresponding base
  modified_base (9)..(9): 2'-hydroxy corresponding base
  modified_base (10)..(10): 2'-deoxy-2'-fluoro corresponding base
  modified_base (11)..(11): 2'-deoxy-2'-fluoro corresponding base
  modified_base (12)..(12): 2'-deoxy-2'-fluoro corresponding base
  modified_base (13)..(13): 2'-hydroxy corresponding base
  modified_base (14)..(14): 2'-deoxy-2'-fluoro corresponding base
  modified_base (15)..(15): 2'-deoxy-2'-fluoro corresponding base
  modified_base (16)..(16): 2'-deoxy-2'-fluoro corresponding base
  modified_base (17)..(17): 2'-hydroxy corresponding base
  modified_base (18)..(18): 2'-hydroxy corresponding base
  modified_base (19)..(19): 2'-hydroxy corresponding base
  modified_base (20)..(20): 2'-hydroxy corresponding base
gccuggagguuuauucggaa

SEQ ID NO: 1482 - DNA, 21 bp, Artificial Sequence
  Description of Artificial Sequence: Synthetic oligonucleotide
  Description of Combined DNA/RNA Molecule: Synthetic oligonucleotide
  siRNAs to PCSK9
  modified_base (1)..(1): 2'-hydroxy corresponding base
  modified_base (2)..(2): 2'-hydroxy corresponding base
  modified_base (3)..(3): 2'-hydroxy corresponding base
  modified_base (4)..(4): 2'-hydroxy corresponding base
  modified_base (5)..(5): 2'-hydroxy corresponding base
  modified_base (6)..(6): 2'-hydroxy corresponding base
  modified_base (7)..(7): 2'-hydroxy corresponding base
  modified_base (8)..(8): 2'-O-methyl corresponding base
  modified_base (9)..(9): 2'-hydroxy corresponding base
  modified_base (10)..(10): 2'-hydroxy corresponding base
  modified_base (11)..(11): 2'-hydroxy corresponding base
  modified_base (12)..(12): 2'-hydroxy corresponding base
  modified_base (13)..(13): 2'-hydroxy corresponding base
  modified_base (14)..(14): 2'-hydroxy corresponding base
  modified_base (15)..(15): 2'-O-methyl corresponding base
  modified_base (16)..(16): 2'-hydroxy corresponding base
  modified_base (17)..(17): 2'-hydroxy corresponding base
  modified_base (18)..(18): 2'-hydroxy corresponding base
  modified_base (19)..(19): 2'-hydroxy corresponding base
  modified_base (20)..(20): deoxythymidine
  modified_base (21)..(21): 5'-thio thymidine
uuccgaauaaacuccaggctt

SEQ ID NO: 1483 - RNA, 20 nt, Artificial Sequence
  Description of Artificial Sequence: Synthetic oligonucleotide
  siRNAs to PCSK9
  modified_base (1)..(1): 2'-hydroxy corresponding base
  modified_base (2)..(2): 2'-deoxy-2'-fluoro corresponding base
  modified_base (3)..(3): 2'-deoxy-2'-fluoro corresponding base
  modified_base (4)..(4): 2'-deoxy-2'-fluoro corresponding base
  modified_base (5)..(5): 2'-hydroxy corresponding base
  modified_base (6)..(6): 2'-hydroxy corresponding base
  modified_base (7)..(7): 2'-hydroxy corresponding base
  modified_base (8)..(8): 2'-hydroxy corresponding base
  modified_base (9)..(9): 2'-hydroxy corresponding base
  modified_base (10)..(10): 2'-deoxy-2'-fluoro corresponding base
  modified_base (11)..(11): 2'-deoxy-2'-fluoro corresponding base
  modified_base (12)..(12): 2'-deoxy-2'-fluoro corresponding base
  modified_base (13)..(13): 2'-hydroxy corresponding base
  modified_base (14)..(14): 2'-deoxy-2'-fluoro corresponding base
  modified_base (15)..(15): 2'-deoxy-2'-fluoro corresponding base
  modified_base (16)..(16): 2'-deoxy-2'-fluoro corresponding base
  modified_base (17)..(17): 2'-hydroxy corresponding base
  modified_base (18)..(18): 2'-hydroxy corresponding base
  modified_base (19)..(19): 2'-hydroxy corresponding base
  modified_base (20)..(20): 2'-hydroxy corresponding base
gccuggagguuuauucggaa

SEQ ID NO: 1484 - DNA, 21 bp, Artificial Sequence
  Description of Artificial Sequence: Synthetic oligonucleotide
  Description of Combined DNA/RNA Molecule: Synthetic oligonucleotide
  siRNAs to PCSK9
  modified_base (1)..(1): 2'-O-methyl corresponding base
  modified_base (2)..(2): 2'-hydroxy corresponding base
  modified_base (3)..(3): 2'-O-methyl corresponding base
  modified_base (4)..(4): 2'-hydroxy corresponding base
  modified_base (5)..(5): 2'-hydroxy corresponding base
  modified_base (6)..(6): 2'-hydroxy corresponding base
  modified_base (7)..(7): 2'-hydroxy corresponding base
  modified_base (8)..(8): 2'-O-methyl corresponding base
  modified_base (9)..(9): 2'-hydroxy corresponding base
  modified_base (10)..(10): 2'-hydroxy corresponding base
  modified_base (11)..(11): 2'-hydroxy corresponding base
  modified_base (12)..(12): 2'-hydroxy corresponding base
  modified_base (13)..(13): 2'-hydroxy corresponding base
  modified_base (14)..(14): 2'-O-methyl corresponding base
  modified_base (15)..(15): 2'-O-methyl corresponding base
  modified_base (16)..(16): 2'-hydroxy corresponding base
  modified_base (17)..(17): 2'-hydroxy corresponding base
  modified_base (18)..(18): 2'-hydroxy corresponding base
  modified_base (19)..(19): 2'-hydroxy corresponding base
  modified_base (20)..(20): deoxythymidine
  modified_base (21)..(21): 5'-thio thymidine
uuccgaauaaacuccaggctt

SEQ ID NO: 1485 - DNA, 21 bp, Artificial Sequence
  Description of Artificial Sequence: Synthetic oligonucleotide
  Description of Combined DNA/RNA Molecule: Synthetic oligonucleotide
  siRNAs to PCSK9
  modified_base (1)..(1): 2'-hydroxy corresponding base
  modified_base (2)..(2): 2'-O-methoxyethyl corresponding base
  modified_base (3)..(3): 2'-hydroxy corresponding base
  modified_base (4)..(4): 2'-O-methoxyethyl corresponding base
  modified_base (5)..(5): 2'-hydroxy corresponding base
  modified_base (6)..(6): 2'-O-methoxyethyl corresponding base
  modified_base (7)..(7): 2'-hydroxy corresponding base
  modified_base (8)..(8): 2'-O-methoxyethyl corresponding base
  modified_base (9)..(9): 2'-hydroxy corresponding base
  modified_base (10)..(10): 2'-O-methoxyethyl corresponding base
  modified_base (11)..(11): 2'-hydroxy corresponding base
  modified_base (12)..(12): 2'-O-methoxyethyl corresponding base
  modified_base (13)..(13): 2'-hydroxy corresponding base
  modified_base (14)..(14): 2'-O-methoxyethyl corresponding base
  modified_base (15)..(15): 2'-hydroxy corresponding base
  modified_base (16)..(16): 2'-O-methoxyethyl corresponding base
  modified_base (17)..(17): 2'-hydroxy corresponding base
  modified_base (18)..(18): 2'-O-methoxyethyl corresponding base
  modified_base (19)..(19): 2'-hydroxy corresponding base
  modified_base (20)..(20): deoxythymidine
  modified_base (21)..(21): 5'-thio thymidine
gccuggaguuuauucggaatt

SEQ ID NO: 1486 - RNA, 21 nt, Artificial Sequence
  Description of Artificial Sequence: Synthetic oligonucleotide
  siRNAs to PCSK9
  modified_base (1)..(1): 2'-deoxy-2'-fluoro corresponding base
  modified_base (2)..(2): 2'-deoxy-2'-fluoro corresponding base
  modified_base (3)..(3): 2'-deoxy-2'-fluoro corresponding base
  modified_base (4)..(4): 2'-deoxy-2'-fluoro corresponding base
  modified_base (5)..(5): 2'-hydroxy corresponding base
  modified_base (6)..(6): 2'-hydroxy corresponding base
  modified_base (7)..(7): 2'-hydroxy corresponding base
  modified_base (8)..(8): 2'-deoxy-2'-fluoro corresponding base
  modified_base (9)..(9): 2'-hydroxy corresponding base
  modified_base (10)..(10): 2'-hydroxy corresponding base
  modified_base (11)..(11): 2'-hydroxy corresponding base
  modified_base (12)..(12): 2'-deoxy-2'-fluoro corresponding base
  modified_base (13)..(13): 2'-deoxy-2'-fluoro corresponding base
  modified_base (14)..(14): 2'-deoxy-2'-fluoro corresponding base
  modified_base (15)..(15): 2'-deoxy-2'-fluoro corresponding base
  modified_base (16)..(16): 2'-hydroxy corresponding base
  modified_base (17)..(17): 2'-hydroxy corresponding base
  modified_base (18)..(18): 2'-hydroxy corresponding base
  modified_base (19)..(19): 2'-deoxy-2'-fluoro corresponding base
  modified_base (20)..(20): 2'-deoxy-2'-fluoro corresponding base 5'-monophosphorothioate
  modified_base (21)..(21): 2'-deoxy-2'-fluoro corresponding base 5'-monophosphorothioate
uuccgaauaaacuccaggccu

SEQ ID NO: 1487 - RNA, 19 nt, Artificial Sequence
  Description of Artificial Sequence: Synthetic oligonucleotide
  siRNAs to PCSK9
  modified_base (1)..(1): 2'-hydroxy corresponding base
  modified_base (2)..(2): 2'-O-methoxyethyl corresponding base
  modified_base (3)..(3): 2'-hydroxy corresponding base
  modified_base (4)..(4): 2'-O-methoxyethyl corresponding base
  modified_base (5)..(5): 2'-hydroxy corresponding base
  modified_base (6)..(6): 2'-O-methoxyethyl corresponding base
  modified_base (7)..(7): 2'-hydroxy corresponding base
  modified_base (8)..(8): 2'-O-methoxyethyl corresponding base
  modified_base (9)..(9): 2'-hydroxy corresponding base
  modified_base (10)..(10): 2'-O-methoxyethyl corresponding base
  modified_base (11)..(11): 2'-hydroxy corresponding base
  modified_base (12)..(12): 2'-O-methoxyethyl corresponding base
  modified_base (13)..(13): 2'-hydroxy corresponding base
  modified_base (14)..(14): 2'-O-methoxyethyl corresponding base
  modified_base (15)..(15): 2'-hydroxy corresponding base
  modified_base (16)..(16): 2'-O-methoxyethyl corresponding base
  modified_base (17)..(17): 2'-hydroxy corresponding base
  modified_base (18)..(18): 2'-O-methoxyethyl corresponding base
  modified_base (19)..(19): 2'-hydroxy corresponding base
gccuggaguuuauucggaa

SEQ ID NO: 1488 - RNA, 21 nt, Artificial Sequence
  Description of Artificial Sequence: Synthetic oligonucleotide
  siRNAs to PCSK9
  modified_base (1)..(1): 2'-deoxy-2'-fluoro corresponding base
  modified_base (2)..(2): 2'-deoxy-2'-fluoro corresponding base
  modified_base (3)..(3): 2'-deoxy-2'-fluoro corresponding base
  modified_base (4)..(4): 2'-deoxy-2'-fluoro corresponding base
  modified_base (5)..(5): 2'-hydroxy corresponding base
  modified_base (6)..(6): 2'-hydroxy corresponding base
  modified_base (7)..(7): 2'-hydroxy corresponding base
  modified_base (8)..(8): 2'-deoxy-2'-fluoro corresponding base
  modified_base (9)..(9): 2'-hydroxy corresponding base
  modified_base (10)..(10): 2'-hydroxy corresponding base
  modified_base (11)..(11): 2'-hydroxy corresponding base
  modified_base (12)..(12): 2'-deoxy-2'-fluoro corresponding base
  modified_base (13)..(13): 2'-deoxy-2'-fluoro corresponding base
  modified_base (14)..(14): 2'-deoxy-2'-fluoro corresponding base
  modified_base (15)..(15): 2'-deoxy-2'-fluoro corresponding base
  modified_base (16)..(16): 2'-hydroxy corresponding base
  modified_base (17)..(17): 2'-hydroxy corresponding base
  modified_base (18)..(18): 2'-hydroxy corresponding base
  modified_base (19)..(19): 2'-deoxy-2'-fluoro corresponding base
  modified_base (20)..(20): 2'-deoxy-2'-fluoro corresponding base 5'-monophosphorothioate
  modified_base (21)..(21): 2'-deoxy-2'-fluoro corresponding base 5'-monophosphorothioate
uuccgaauaaacuccaggccu

SEQ ID NO: 1489 - RNA, 19 nt, Artificial Sequence
  Description of Artificial Sequence: Synthetic oligonucleotide
  siRNAs to PCSK9
  modified_base (1)..(1): 2'-deoxy-2'-fluoro corresponding base
  modified_base (2)..(2): 2'-O-methyl corresponding base
  modified_base (3)..(3): 2'-deoxy-2'-fluoro corresponding base
  modified_base (4)..(4): 2'-O-methyl corresponding base
  modified_base (5)..(5): 2'-deoxy-2'-fluoro corresponding base
  modified_base (6)..(6): 2'-O-methyl corresponding base
  modified_base (7)..(7): 2'-deoxy-2'-fluoro corresponding base
  modified_base (8)..(8): 2'-O-methyl corresponding base
  modified_base (9)..(9): 2'-deoxy-2'-fluoro corresponding base
  modified_base (10)..(10): 2'-O-methyl corresponding base
  modified_base (11)..(11): 2'-deoxy-2'-fluoro corresponding base
  modified_base (12)..(12): 2'-O-methyl corresponding base
  modified_base (13)..(13): 2'-deoxy-2'-fluoro corresponding base
  modified_base (14)..(14): 2'-O-methyl corresponding base
  modified_base (15)..(15): 2'-deoxy-2'-fluoro corresponding base
  modified_base (16)..(16): 2'-O-methyl corresponding base
  modified_base (17)..(17): 2'-deoxy-2'-fluoro corresponding base
  modified_base (18)..(18): 2'-O-methyl corresponding base
  modified_base (19)..(19): 2'-deoxy-2'-fluoro corresponding base
gccuggaguuuauucggaa

SEQ ID NO: 1490 - RNA, 21 nt, Artificial Sequence
  Description of Artificial Sequence: Synthetic oligonucleotide
  siRNAs to PCSK9
  modified_base (1)..(1): 2'-deoxy-2'-fluoro corresponding base
  modified_base (2)..(2): 2'-deoxy-2'-fluoro corresponding base
  modified_base (3)..(3): 2'-deoxy-2'-fluoro corresponding base
  modified_base (4)..(4): 2'-deoxy-2'-fluoro corresponding base
  modified_base (5)..(5): 2'-hydroxy corresponding base
  modified_base (6)..(6): 2'-hydroxy corresponding base
  modified_base (7)..(7): 2'-hydroxy corresponding base
  modified_base (8)..(8): 2'-deoxy-2'-fluoro corresponding base
  modified_base (9)..(9): 2'-hydroxy corresponding base
  modified_base (10)..(10): 2'-hydroxy corresponding base
  modified_base (11)..(11): 2'-hydroxy corresponding base
  modified_base (12)..(12): 2'-deoxy-2'-fluoro corresponding base
  modified_base (13)..(13): 2'-deoxy-2'-fluoro corresponding base
  modified_base (14)..(14): 2'-deoxy-2'-fluoro corresponding base
  modified_base (15)..(15): 2'-deoxy-2'-fluoro corresponding base
  modified_base (16)..(16): 2'-hydroxy corresponding base
  modified_base (17)..(17): 2'-hydroxy corresponding base
  modified_base (18)..(18): 2'-hydroxy corresponding base
  modified_base (19)..(19): 2'-deoxy-2'-fluoro corresponding base
  modified_base (20)..(20): 2'-deoxy-2'-fluoro corresponding base 5'-monophosphorothioate
  modified_base (21)..(21): 2'-deoxy-2'-fluoro corresponding base 5'-monophosphorothioate
uuccgaauaaacuccaggccu

SEQ ID NO: 1491 - DNA, 21 bp, Artificial Sequence
  Description of Artificial Sequence: Synthetic oligonucleotide
  Description of Combined DNA/RNA Molecule: Synthetic oligonucleotide
  siRNAs to PCSK9
  modified_base (1)..(1): 2'-deoxy-2'-fluoro corresponding base
  modified_base (2)..(2): 2'-O-methyl corresponding base
  modified_base (3)..(3): 2'-deoxy-2'-fluoro corresponding base
  modified_base (4)..(4): 2'-O-methyl corresponding base
  modified_base (5)..(5): 2'-deoxy-2'-fluoro corresponding base
  modified_base (6)..(6): 2'-O-methyl corresponding base
  modified_base (7)..(7): 2'-deoxy-2'-fluoro corresponding base
  modified_base (8)..(8): 2'-O-methyl corresponding base
  modified_base (9)..(9): 2'-deoxy-2'-fluoro corresponding base
  modified_base (10)..(10): 2'-O-methyl corresponding base
  modified_base (11)..(11): 2'-deoxy-2'-fluoro corresponding base
  modified_base (12)..(12): 2'-O-methyl corresponding base
  modified_base (13)..(13): 2'-deoxy-2'-fluoro corresponding base
  modified_base (14)..(14): 2'-O-methyl corresponding base
  modified_base (15)..(15): 2'-deoxy-2'-fluoro corresponding base
  modified_base (16)..(16): 2'-O-methyl corresponding base
  modified_base (17)..(17): 2'-deoxy-2'-fluoro corresponding base
  modified_base (18)..(18): 2'-O-methyl corresponding base
  modified_base (19)..(19): 2'-deoxy-2'-fluoro corresponding base
  modified_base (20)..(20): deoxythymidine
  modified_base (21)..(21): 5'-thio thymidine
gccuggaguuuauucggaatt

SEQ ID NO: 1492 - RNA, 21 nt, Artificial Sequence
  Description of Artificial Sequence: Synthetic oligonucleotide
  siRNAs to PCSK9
  modified_base (1)..(1): 2'-deoxy-2'-fluoro corresponding base
  modified_base (2)..(2): 2'-deoxy-2'-fluoro corresponding base
  modified_base (3)..(3): 2'-deoxy-2'-fluoro corresponding base
  modified_base (4)..(4): 2'-deoxy-2'-fluoro corresponding base
  modified_base (5)..(5): 2'-hydroxy corresponding base
  modified_base (6)..(6): 2'-hydroxy corresponding base
  modified_base (7)..(7): 2'-hydroxy corresponding base
  modified_base (8)..(8): 2'-deoxy-2'-fluoro corresponding base
  modified_base (9)..(9): 2'-hydroxy corresponding base
  modified_base (10)..(10): 2'-hydroxy corresponding base
  modified_base (11)..(11): 2'-hydroxy corresponding base
  modified_base (12)..(12): 2'-deoxy-2'-fluoro corresponding base
  modified_base (13)..(13): 2'-deoxy-2'-fluoro corresponding base
  modified_base (14)..(14): 2'-deoxy-2'-fluoro corresponding base
  modified_base (15)..(15): 2'-deoxy-2'-fluoro corresponding base
  modified_base (16)..(16): 2'-hydroxy corresponding base
  modified_base (17)..(17): 2'-hydroxy corresponding base
  modified_base (18)..(18): 2'-hydroxy corresponding base
  modified_base (19)..(19): 2'-deoxy-2'-fluoro corresponding base
  modified_base (20)..(20): 2'-deoxy-2'-fluoro corresponding base 5'-monophosphorothioate
  modified_base (21)..(21): 2'-deoxy-2'-fluoro corresponding base 5'-monophosphorothioate
uuccgaauaaacuccaggccu

SEQ ID NO: 1493 - DNA, 21 bp, Artificial Sequence
  Description of Artificial Sequence: Synthetic oligonucleotide
  Description of Combined DNA/RNA Molecule: Synthetic oligonucleotide
  siRNAs to PCSK9
  modified_base (1)..(1): 2'-hydroxy corresponding base
  modified_base (2)..(2): 2'-O-methyl corresponding base
  modified_base (3)..(3): 2'-hydroxy corresponding base
  modified_base (4)..(4): 2'-O-methyl corresponding base
  modified_base (5)..(5): 2'-hydroxy corresponding base
  modified_base (6)..(6): 2'-O-methyl corresponding base
  modified_base (7)..(7): 2'-hydroxy corresponding base
  modified_base (8)..(8): 2'-O-methyl corresponding base
  modified_base (9)..(9): 2'-hydroxy corresponding base
  modified_base (10)..(10): 2'-O-methyl corresponding base
  modified_base (11)..(11): 2'-hydroxy corresponding base
  modified_base (12)..(12): 2'-O-methyl corresponding base
  modified_base (13)..(13): 2'-hydroxy corresponding base
  modified_base (14)..(14): 2'-O-methyl corresponding base
  modified_base (15)..(15): 2'-hydroxy corresponding base
  modified_base (16)..(16): 2'-O-methyl corresponding base
  modified_base (17)..(17): 2'-hydroxy corresponding base
  modified_base (18)..(18): 2'-O-methyl corresponding base
  modified_base (19)..(19): 2'-hydroxy corresponding base
  modified_base (20)..(20): deoxythymidine
  modified_base (21)..(21): 5'-thio thymidine
gccuggaguuuauucggaatt

SEQ ID NO: 1494 - RNA, 21 nt, Artificial Sequence
  Description of Artificial Sequence: Synthetic oligonucleotide
  siRNAs to PCSK9
  modified_base (1)..(1): 2'-deoxy-2'-fluoro corresponding base
  modified_base (2)..(2): 2'-deoxy-2'-fluoro corresponding base
  modified_base (3)..(3): 2'-deoxy-2'-fluoro corresponding base
  modified_base (4)..(4): 2'-deoxy-2'-fluoro corresponding base
  modified_base (5)..(5): 2'-hydroxy corresponding base
  modified_base (6)..(6): 2'-hydroxy corresponding base
  modified_base (7)..(7): 2'-hydroxy corresponding base
  modified_base (8)..(8): 2'-deoxy-2'-fluoro corresponding base
  modified_base (9)..(9): 2'-hydroxy corresponding base
  modified_base (10)..(10): 2'-hydroxy corresponding base
  modified_base (11)..(11): 2'-hydroxy corresponding base
  modified_base (12)..(12): 2'-deoxy-2'-fluoro corresponding base
  modified_base (13)..(13): 2'-deoxy-2'-fluoro corresponding base
  modified_base (14)..(14): 2'-deoxy-2'-fluoro corresponding base
  modified_base (15)..(15): 2'-deoxy-2'-fluoro corresponding base
  modified_base (16)..(16): 2'-hydroxy corresponding base
  modified_base (17)..(17): 2'-hydroxy corresponding base
  modified_base (18)..(18): 2'-hydroxy corresponding base
  modified_base (19)..(19): 2'-deoxy-2'-fluoro corresponding base
  modified_base (20)..(20): 2'-deoxy-2'-fluoro corresponding base 5'-monophosphorothioate
  modified_base (21)..(21): 2'-deoxy-2'-fluoro corresponding base 5'-monophosphorothioate
uuccgaauaaacuccaggccu

SEQ ID NO: 1495 - DNA, 21 bp, Artificial Sequence
  Description of Artificial Sequence: Synthetic oligonucleotide
  Description of Combined DNA/RNA Molecule: Synthetic oligonucleotide
  siRNAs to PCSK9
  modified_base (1)..(1): 2'-hydroxy corresponding base
  modified_base (2)..(2): 2'-hydroxy corresponding base
  modified_base (3)..(3): 2'-hydroxy corresponding base
  modified_base (4)..(4): 2'-hydroxy corresponding base
  modified_base (5)..(5): 2'-hydroxy corresponding base
  modified_base (6)..(6): 2'-hydroxy corresponding base
  modified_base (7)..(7): 2'-hydroxy corresponding base
  modified_base (8)..(8): 2'-hydroxy corresponding base
  modified_base (9)..(9): 2'-hydroxy corresponding base
  modified_base (10)..(10): 2'-hydroxy corresponding base
  modified_base (11)..(11): 2'-hydroxy corresponding base
  modified_base (12)..(12): 2'-hydroxy corresponding base
  modified_base (13)..(13): 2'-hydroxy corresponding base
  modified_base (14)..(14): 2'-hydroxy corresponding base
  modified_base (15)..(15): 2'-hydroxy corresponding base
  modified_base (16)..(16): 2'-hydroxy corresponding base
  modified_base (17)..(17): 2'-hydroxy corresponding base
  modified_base (18)..(18): 2'-hydroxy corresponding base
  modified_base (19)..(19): 2'-hydroxy corresponding base
  modified_base (20)..(20): deoxythymidine
  modified_base (21)..(21): 5'-thio thymidine
gccuggaguuuauucggaatt

SEQ ID NO: 1496 - RNA, 21 nt, Artificial Sequence
  Description of Artificial Sequence: Synthetic oligonucleotide
  siRNAs to PCSK9
  modified_base (1)..(1): 2'-deoxy-2'-fluoro corresponding base
  modified_base (2)..(2): 2'-deoxy-2'-fluoro corresponding base
  modified_base (3)..(3): 2'-deoxy-2'-fluoro corresponding base
  modified_base (4)..(4): 2'-deoxy-2'-fluoro corresponding base
  modified_base (5)..(5): 2'-hydroxy corresponding base
  modified_base (6)..(6): 2'-hydroxy corresponding base
  modified_base (7)..(7): 2'-hydroxy corresponding base
  modified_base (8)..(8): 2'-deoxy-2'-fluoro corresponding base
  modified_base (9)..(9): 2'-hydroxy corresponding base
  modified_base (10)..(10): 2'-hydroxy corresponding base
  modified_base (11)..(11): 2'-hydroxy corresponding base
  modified_base (12)..(12): 2'-deoxy-2'-fluoro corresponding base
  modified_base (13)..(13): 2'-deoxy-2'-fluoro corresponding base
  modified_base (14)..(14): 2'-deoxy-2'-fluoro corresponding base
  modified_base (15)..(15): 2'-deoxy-2'-fluoro corresponding base
  modified_base (16)..(16): 2'-hydroxy corresponding base
  modified_base (17)..(17): 2'-hydroxy corresponding base
  modified_base (18)..(18): 2'-hydroxy corresponding base
  modified_base (19)..(19): 2'-deoxy-2'-fluoro corresponding base
  modified_base (20)..(20): 2'-deoxy-2'-fluoro corresponding base 5'-monophosphorothioate
  modified_base (21)..(21): 2'-deoxy-2'-fluoro corresponding base 5'-monophosphorothioate
uuccgaauaaacuccaggccu

SEQ ID NO: 1497 - DNA, 21 bp, Artificial Sequence
  Description of Artificial Sequence: Synthetic oligonucleotide
  Description of Combined DNA/RNA Molecule: Synthetic oligonucleotide
  siRNAs to PCSK9
  modified_base (1)..(1): 2'-hydroxy corresponding base
  modified_base (2)..(2): 2'-O-methyl corresponding base
  modified_base (3)..(3): 2'-O-methyl corresponding base
  modified_base (4)..(4): 2'-O-methyl corresponding base
  modified_base (5)..(5): 2'-hydroxy corresponding base
  modified_base (6)..(6): 2'-hydroxy corresponding base
  modified_base (7)..(7): 2'-hydroxy corresponding base
  modified_base (8)..(8): 2'-hydroxy corresponding base
  modified_base (9)..(9): 2'-O-methyl corresponding base
  modified_base (10)..(10): 2'-O-methyl corresponding base
  modified_base (11)..(11): 2'-O-methyl corresponding base
  modified_base (12)..(12): 2'-hydroxy corresponding base
  modified_base (13)..(13): 2'-O-methyl corresponding base
  modified_base (14)..(14): 2'-O-methyl corresponding base
  modified_base (15)..(15): 2'-O-methyl corresponding base
  modified_base (16)..(16): 2'-hydroxy corresponding base
  modified_base (17)..(17): 2'-hydroxy corresponding base
  modified_base (18)..(18): 2'-hydroxy corresponding base
  modified_base (19)..(19): 2'-hydroxy corresponding base
  modified_base (20)..(20): deoxythymidine
  modified_base (21)..(21): 5'-thio thymidine
gccuggaguuuauucggaatt

SEQ ID NO: 1498 - RNA, 21 nt, Artificial Sequence
  Description of Artificial Sequence: Synthetic oligonucleotide
  siRNAs to PCSK9
  modified_base (1)..(1): 2'-deoxy-2'-fluoro corresponding base
  modified_base (2)..(2): 2'-deoxy-2'-fluoro corresponding base
  modified_base (3)..(3): 2'-deoxy-2'-fluoro corresponding base
  modified_base (4)..(4): 2'-deoxy-2'-fluoro corresponding base
  modified_base (5)..(5): 2'-hydroxy corresponding base
  modified_base (6)..(6): 2'-hydroxy corresponding base
  modified_base (7)..(7): 2'-hydroxy corresponding base
  modified_base (8)..(8): 2'-deoxy-2'-fluoro corresponding base
  modified_base (9)..(9): 2'-hydroxy corresponding base
  modified_base (10)..(10): 2'-hydroxy corresponding base
  modified_base (11)..(11): 2'-hydroxy corresponding base
  modified_base (12)..(12): 2'-deoxy-2'-fluoro corresponding base
  modified_base (13)..(13): 2'-deoxy-2'-fluoro corresponding base
  modified_base (14)..(14): 2'-deoxy-2'-fluoro corresponding base
  modified_base (15)..(15): 2'-deoxy-2'-fluoro corresponding base
  modified_base (16)..(16): 2'-hydroxy corresponding base
  modified_base (17)..(17): 2'-hydroxy corresponding base
  modified_base (18)..(18): 2'-hydroxy corresponding base
  modified_base (19)..(19): 2'-deoxy-2'-fluoro corresponding base
  modified_base (20)..(20): 2'-deoxy-2'-fluoro corresponding base 5'-monophosphorothioate
  modified_base (21)..(21): 2'-deoxy-2'-fluoro corresponding base 5'-monophosphorothioate
uuccgaauaaacuccaggccu

SEQ ID NO: 1499 - RNA, 19 nt, Artificial Sequence
  Description of Artificial Sequence: Synthetic oligonucleotide
  siRNAs to PCSK9
  modified_base (1)..(1): 2'-hydroxy corresponding base
  modified_base (2)..(2): 2'-O-methyl corresponding base
  modified_base (3)..(3): 2'-O-methyl corresponding base
  modified_base (4)..(4): 2'-O-methyl corresponding base
  modified_base (5)..(5): 2'-hydroxy corresponding base
  modified_base (6)..(6): 2'-hydroxy corresponding base
  modified_base (7)..(7): 2'-hydroxy corresponding base
  modified_base (8)..(8): 2'-hydroxy corresponding base
  modified_base (9)..(9): 2'-O-methyl corresponding base
  modified_base (10)..(10): 2'-O-methyl corresponding base
  modified_base (11)..(11): 2'-O-methyl corresponding base
  modified_base (12)..(12): 2'-hydroxy corresponding base
  modified_base (13)..(13): 2'-O-methyl corresponding base
  modified_base (14)..(14): 2'-O-methyl corresponding base
  modified_base (15)..(15): 2'-O-methyl corresponding base
  modified_base (16)..(16): 2'-hydroxy corresponding base
  modified_base (17)..(17): 2'-hydroxy corresponding base
  modified_base (18)..(18): 2'-hydroxy corresponding base
  modified_base (19)..(19): 2'-hydroxy corresponding base
gccuggaguuuauucggaa

SEQ ID NO: 1500 - RNA, 21 nt, Artificial Sequence
  Description of Artificial Sequence: Synthetic oligonucleotide
  siRNAs to PCSK9
  modified_base (1)..(1): 2'-deoxy-2'-fluoro corresponding base
  modified_base (2)..(2): 2'-deoxy-2'-fluoro corresponding base
  modified_base (3)..(3): 2'-deoxy-2'-fluoro corresponding base
  modified_base (4)..(4): 2'-deoxy-2'-fluoro corresponding base
  modified_base (5)..(5): 2'-hydroxy corresponding base
  modified_base (6)..(6): 2'-hydroxy corresponding base
  modified_base (7)..(7): 2'-hydroxy corresponding base
  modified_base (8)..(8): 2'-deoxy-2'-fluoro corresponding base
  modified_base (9)..(9): 2'-hydroxy corresponding base
  modified_base (10)..(10): 2'-hydroxy corresponding base
  modified_base (11)..(11): 2'-hydroxy corresponding base
  modified_base (12)..(12): 2'-deoxy-2'-fluoro corresponding base
  modified_base (13)..(13): 2'-deoxy-2'-fluoro corresponding base
  modified_base (14)..(14): 2'-deoxy-2'-fluoro corresponding base
  modified_base (15)..(15): 2'-deoxy-2'-fluoro corresponding base
  modified_base (16)..(16): 2'-hydroxy corresponding base
  modified_base (17)..(17): 2'-hydroxy corresponding base
  modified_base (18)..(18): 2'-hydroxy corresponding base
  modified_base (19)..(19): 2'-deoxy-2'-fluoro corresponding base
  modified_base (20)..(20): 2'-deoxy-2'-fluoro corresponding base 5'-monophosphorothioate
  modified_base (21)..(21): 2'-deoxy-2'-fluoro corresponding base 5'-monophosphorothioate
uuccgaauaaacuccaggccu

SEQ ID NO: 1501 - RNA, 20 nt, Artificial Sequence
  Description of Artificial Sequence: Synthetic oligonucleotide
  siRNAs to PCSK9
  modified_base (1)..(1): 2'-hydroxy corresponding base
  modified_base (2)..(2): 2'-deoxy-2'-fluoro corresponding base
  modified_base (3)..(3): 2'-deoxy-2'-fluoro corresponding base
  modified_base (4)..(4): 2'-deoxy-2'-fluoro corresponding base
  modified_base (5)..(5): 2'-hydroxy corresponding base
  modified_base (6)..(6): 2'-hydroxy corresponding base
  modified_base (7)..(7): 2'-hydroxy corresponding base
  modified_base (8)..(8): 2'-hydroxy corresponding base
  modified_base (9)..(9): 2'-hydroxy corresponding base
  modified_base (10)..(10): 2'-deoxy-2'-fluoro corresponding base
  modified_base (11)..(11): 2'-deoxy-2'-fluoro corresponding base
  modified_base (12)..(12): 2'-deoxy-2'-fluoro corresponding base
  modified_base (13)..(13): 2'-hydroxy corresponding base
  modified_base (14)..(14): 2'-deoxy-2'-fluoro corresponding base
  modified_base (15)..(15): 2'-deoxy-2'-fluoro corresponding base
  modified_base (16)..(16): 2'-deoxy-2'-fluoro corresponding base
  modified_base (17)..(17): 2'-hydroxy corresponding base
  modified_base (18)..(18): 2'-hydroxy corresponding base
  modified_base (19)..(19): 2'-hydroxy corresponding base
  modified_base (20)..(20): 2'-hydroxy corresponding base
gccuggagguuuauucggaa

SEQ ID NO: 1502 - RNA, 21 nt, Artificial Sequence
  Description of Artificial Sequence: Synthetic oligonucleotide
  siRNAs to PCSK9
  modified_base (1)..(1): 2'-deoxy-2'-fluoro corresponding base
  modified_base (2)..(2): 2'-deoxy-2'-fluoro corresponding base
  modified_base (3)..(3): 2'-deoxy-2'-fluoro corresponding base
  modified_base (4)..(4): 2'-deoxy-2'-fluoro corresponding base
  modified_base (5)..(5): 2'-hydroxy corresponding base
  modified_base (6)..(6): 2'-hydroxy corresponding base
  modified_base (7)..(7): 2'-hydroxy corresponding base
  modified_base (8)..(8): 2'-deoxy-2'-fluoro corresponding base
  modified_base (9)..(9): 2'-hydroxy corresponding base
  modified_base (10)..(10): 2'-hydroxy corresponding base
  modified_base (11)..(11): 2'-hydroxy corresponding base
  modified_base (12)..(12): 2'-deoxy-2'-fluoro corresponding base
  modified_base (13)..(13): 2'-deoxy-2'-fluoro corresponding base
  modified_base (14)..(14): 2'-deoxy-2'-fluoro corresponding base
  modified_base (15)..(15): 2'-deoxy-2'-fluoro corresponding base
  modified_base (16)..(16): 2'-hydroxy corresponding base
  modified_base (17)..(17): 2'-hydroxy corresponding base
  modified_base (18)..(18): 2'-hydroxy corresponding base
  modified_base (19)..(19): 2'-deoxy-2'-fluoro corresponding base
  modified_base (20)..(20): 2'-deoxy-2'-fluoro corresponding base 5'-monophosphorothioate
  modified_base (21)..(21): 2'-deoxy-2'-fluoro corresponding base 5'-monophosphorothioate
uuccgaauaaacuccaggccu

SEQ ID NO: 1503 - DNA, 21 bp, Artificial Sequence
  Description of Artificial Sequence: Synthetic oligonucleotide
  Description of Combined DNA/RNA Molecule: Synthetic oligonucleotide
  siRNAs to PCSK9
  modified_base (1)..(1): 2'-hydroxy corresponding base
  modified_base (2)..(2): 2'-hydroxy corresponding base
  modified_base (3)..(3): 2'-hydroxy corresponding base
  modified_base (4)..(4): 2'-hydroxy corresponding base
  modified_base (5)..(5): 2'-hydroxy corresponding base
  modified_base (6)..(6): 2'-hydroxy corresponding base
  modified_base (7)..(7): 2'-hydroxy corresponding base
  modified_base (8)..(8): 2'-hydroxy corresponding base
  modified_base (9)..(9): 2'-hydroxy corresponding base
  modified_base (10)..(10): 2'-hydroxy corresponding base
  modified_base (11)..(11): 2'-hydroxy corresponding base
  modified_base (12)..(12): 2'-hydroxy corresponding base
  modified_base (13)..(13): 2'-hydroxy corresponding base
  modified_base (14)..(14): 2'-hydroxy corresponding base
  modified_base (15)..(15): 2'-hydroxy corresponding base
  modified_base (16)..(16): 2'-hydroxy corresponding base
  modified_base (17)..(17): 2'-hydroxy corresponding base
  modified_base (18)..(18): 2'-hydroxy corresponding base
  modified_base (19)..(19): 2'-hydroxy corresponding base
  modified_base (20)..(20): deoxythymidine
  modified_base (21)..(21): 5'-thio thymidine
gccuggaguuuauucggaatt

SEQ ID NO: 1504 - DNA, 21 bp, Artificial Sequence
  Description of Artificial Sequence: Synthetic oligonucleotide
  Description of Combined DNA/RNA Molecule: Synthetic oligonucleotide
  siRNAs to PCSK9
  modified_base (1)..(1): 2'-hydroxy corresponding base
  modified_base (2)..(2): 2'-hydroxy corresponding base
  modified_base (3)..(3): 2'-hydroxy corresponding base
  modified_base (4)..(4): 2'-hydroxy corresponding base
  modified_base (5)..(5): 2'-hydroxy corresponding base
  modified_base (6)..(6): 2'-hydroxy corresponding base
  modified_base (7)..(7): 2'-hydroxy corresponding base
  modified_base (8)..(8): 2'-hydroxy corresponding base
  modified_base (9)..(9): 2'-hydroxy corresponding base
  modified_base (10)..(10): 2'-hydroxy corresponding base
  modified_base (11)..(11): 2'-hydroxy corresponding base
  modified_base (12)..(12): 2'-hydroxy corresponding base
  modified_base (13)..(13): 2'-hydroxy corresponding base
  modified_base (14)..(14): 2'-hydroxy corresponding base
  modified_base (15)..(15): 2'-hydroxy corresponding base
  modified_base (16)..(16): 2'-hydroxy corresponding base
  modified_base (17)..(17): 2'-hydroxy corresponding base
  modified_base (18)..(18): 2'-hydroxy corresponding base
  modified_base (19)..(19): 2'-hydroxy corresponding base
  modified_base (20)..(20): deoxythymidine
  modified_base (21)..(21): 5'-thio thymidine
uuccgaauaaacuccaggctt

SEQ ID NO: 1505 - RNA, 3636 nt, Homo sapiens
  PCSK9 mRNA
cagcgacgucgaggcgcucaugguugcaggcgggcgccgccguucaguucagggucugagccuggaggagugagccaggcagugagacuggcucgggcgggccgggacgcgucguugcagcagcggcucccagcucccagccaggauuccgcgcgccccuucacgcgcccugcuccugaacuucagcuccugcacaguccuccccaccgcaaggcucaaggcgccgccggcguggaccgcgcacggccucuaggucuccucgccaggacagcaaccucuccccuggcccucaugggcaccgucagcuccaggcgguccugguggccgcugccacugcugcugcugcugcugcugcuccugggucccgcgggcgcccgugcgcaggaggacgaggacggcgacuacgaggagcuggugcuagccuugcguuccgaggaggacggccuggccgaagcacccgagcacggaaccacagccaccuuccaccgcugcgccaaggauccguggagguugccuggcaccuacgugguggugcugaaggaggagacccaccucucgcagucagagcgcacugcccgccgccugcaggcccaggcugcccgccggggauaccucaccaagauccugcaugucuuccauggccuucuuccuggcuuccuggugaagaugaguggcgaccugcuggagcuggccuugaaguugccccaugucgacuacaucgaggaggacuccucugucuuugcccagagcaucccguggaaccuggagcggauuaccccuccacgguaccgggcggaugaauaccagccccccgacggaggcagccugguggagguguaucuccuagacaccagcauacagagugaccaccgggaaaucgagggcagggucauggucaccgacuucgagaaugugcccgaggaggacgggacccgcuuccacagacaggccagcaagugugacagucauggcacccaccuggcagggguggucagcggccgggaugccggcguggccaagggugccagcaugcgcagccugcgcgugcucaacugccaagggaagggcacgguuagcggcacccucauaggccuggaguuuauucggaaaagccagcugguccagccuguggggccacugguggugcugcugccccuggcggguggguacagccgcguccucaacgccgccugccagcgccuggcgagggcuggggucgugcuggucaccgcugccggcaacuuccgggacgaugccugccucuacuccccagccucagcucccgaggucaucacaguuggggccaccaaugcccaagaccagccggugacccuggggacuuuggggaccaacuuuggccgcuguguggaccucuuugccccaggggaggacaucauuggugccuccagcgacugcagcaccugcuuugugucacagagugggacaucacaggcugcugcccacguggcuggcauugcagccaugaugcugucugccgagccggagcucacccuggccgaguugaggcagagacugauccacuucucugccaaagaugucaucaaugaggccugguucccugaggaccagcggguacugacccccaaccugguggccgcccugccccccagcacccauggggcagguuggcagcuguuuugcaggacuguauggucagcacacucggggccuacacggauggccacagccgucgcccgcugcgccccagaugaggagcugcugagcugcuccaguuucuccaggagugggaagcggcggggcgagcgcauggaggcccaagggggcaagcuggucugccgggcccacaacgcuuuugggggugagggugucuacgccauugccaggugcugccugcuaccccaggccaacugcagcguccacacagcuccaccagcugaggccagcauggggacccguguccacugccaccaacagggccacguccucacaggcugcagcucccacugggagguggaggaccuuggcacccacaagccgccugugcugaggccacgaggucagcccaaccagugcgugggccacagggaggccagcauccacgcuuccugcugccaugccccaggucuggaaugcaaagucaaggagcauggaaucccggccccucaggagcaggugaccguggccugcgaggagggcuggacccugacuggcugcagugcccucccugggaccucccacguccugggggccuacgccguagacaacacguguguagucaggagccgggacgucagcacuacaggcagcaccagcgaaggggccgugacagccguugccaucugcugccggagccggcaccuggcgcaggccucccaggagcuccagugacagccccaucccaggaugggugucuggggagggucaagggcuggggcugagcuuuaaaaugguuccgacuugucccucucucagcccuccauggccuggcacgaggggauggggaugcuuccgccuuuccggggcugcuggccuggcccuugaguggggcagccuccuugccuggaacucacucacucugggugccuccuccccagguggaggugccaggaagcucccucccucacuguggggcauuucaccauucaaacaggucgagcugugcucgggugcugccagcugcucccaaugugccgauguccgugggcagaaugacuuuuauugagcucuuguuccgugccaggcauucaauccucaggucuccaccaaggaggcaggauucuucccauggauaggggagggggcgguaggggcugcagggacaaacaucguuggggggugagugugaaaggugcugauggcccucaucuccagcuaacuguggagaagccccugggggcucccugauuaauggaggcuuagcuuucuggauggcaucuagccagaggcuggagacaggugcgccccugguggucacaggcugugccuugguuuccugagccaccuuuacucugcucuaugccaggcugugcuagcaacacccaaagguggccugcggggagccaucaccuaggacugacucggcagugugcaguggugcaugcacugucucagccaacccgcuccacuacccggcaggguacacauucgcaccccuacuucacagaggaagaaaccuggaaccagagggggcgugccugccaagcucacacagcaggaacugagccagaaacgcagauugggcuggcucugaagccaagccucuucuuacuucacccggcugggcuccucauuuuuacggguaacagugaggcugggaaggggaacacagaccaggaagcucggugagugauggcagaacgaugccugcaggcauggaacuuuuuccguuaucacccaggccugauucacuggccuggcggagaugcuucuaaggcauggucgggggagagggccaacaacugucccuccuugagcaccagccccacccaagcaagcagacauuuaucuuuugggucuguccucucuguugccuuuuuacagccaacuuuucuagaccuguuuugcuuuuguaacuugaagauauuuauucuggguuuuguagcauuuuuauuaauauggugacuuuuuaaaauaaaaacaaacaaacguuguccu
